(19) United States
(12) Patent Application Publication
(10) Pub. No.: US 2006/0068386 A1
(43) Pub. Date: Mar. 30, 2006

(54) Complete genome and protein sequence of the hyperthermophile methanopyrus kandleri av19 and monophyly of archael methanogens and methods of use thereof

(76) Inventors: Alexei Slesarev, Boyds, MD (US); Andrei Malykh, Germantown, MD (US); Andrey Pavlov, Gaithersburg, MD (US); Nadezhda Pavlova, Gaithersburg, MD (US); Sergei Kozyavkin, Germantown, MD (US)

Correspondence Address: HOGAN & HARTSON LLP, ONE TABOR CENTER, SUITE 1500, 1200 SEVENTEENTH ST, DENVER, CO, 80202, US

(21) Appl. No.: 10/506,454

(22) PCT Filed: Mar. 4, 2003
(86) PCT No.: PCT/US03/06664

§ 371 Date: Aug. 4, 2005

Related U.S. Application Data
(60) Provisional application No. 60/361,742, filed on Mar. 4, 2002.
(60) Provisional application No. 60/380,423, filed on May 14, 2002.
(60) Provisional application No. 60/410,974, filed on Sep. 16, 2002.

(51) Int. Cl. C12Q 1/68; C07H 21/04; C12P 21/06; C07K 16/12; C07K 14/195

(52) U.S. Cl. 435/6; 435/69.1; 435/252.3; 435/320.1; 530/350; 536/23.7; 530/388.4

(57) ABSTRACT

We have determined the complete 1,694,969 nucleotide sequence of the GC-rich genome of Methanopyrus kandleri using a novel approach. It is based on unlinking genomic DNA with the ThermoFidelase version of M. kandleri topoisomerase V and cycle sequencing directed by 2′-modified oligonucleotides (Fimers). 3.3× sequencing redundancy was sufficient to assemble the genome with <1 error per 40 kb. Using a combination of sequence database searches and coding potential prediction, 1692 protein-coding genes and 39 genes for structural RNAs were identified. M. kandleri proteins show an unusually high content of negatively charged amino acids, which might be an adaptation to its high intracellular salinity. Previous phylogenetic analysis of 16S RNA suggested that M. kandleri belonged to a very deep branch, close to the root of the archaeal tree. However, genome comparisons, using both trees constructed from concatenated alignments of ribosomal proteins and trees based on gene content, indicate that M. kandleri consistently groups with other archaeal methanogens. M. kandleri shares the set of genes implicated in methanogenesis and, in part, its operon organization with Methanococcus jannaschii and Methanothermobacter thermoautotrophicus. These findings indicate that archaeal methanogens are monophyletic. A distinctive feature of M. kandleri is the paucity of proteins involved in signaling and regulation of gene expression: Also, M. kandleri appears to have fewer genes acquired via lateral transfer than other archaea. These features might reflect the extreme habitat of this organism.

### CROSS-REFERENCE TO OTHER APPLICATIONS

[0001] This patent claims priority to U.S. Provisional Patent application 60/361,742 filed Mar. 4, 2002 and 60/410,974 entitled “Helix-hairpin-helix motifs to manipulate properties of DNA processing enzymes,” filed Sep. 16, 2002, both of which are hereby incorporated by reference.

### CONTRACTUAL ORIGIN OF INVENTION

[0002] This work was supported in part by DOE and NIH grants (DE-FG02-98ER82577, 00ER83009, R44GM55485, R43HG02186) to S.A.K and A.I.S.

### BACKGROUND OF THE INVENTION

[0003] 1. Field of the Invention

[0004] This invention relates to novel methods of sequencing directly from genomic DNA. In particular, the genomic DNA of the bacterial species Methanopyrus kandleri AV19 was unlinked with ThermoFidelase version of M. kandleri topoisomerase V and its entire nucleotide sequence was determined by directed cycle sequencing using 2′-modified oligonucleotides (Fimers). The resulting genomic sequences, protein sequences from M. kandleri and there uses in research and diagnostics fields are herein disclosed.

[0005] 2. Description of the State of Art

[0006] Methanopyrus kandleri was isolated from the sea floor at the base of a 2,000 meter-deep “black smoker” chimney in the Gulf of California (Huber, R., et al., Nature, 342:833-6 (1989)). The organism is a rod-shaped, Gram-positive methanogen that grows chemolithoautotrophically at 80 to 110° C. in the H₂—CO₂ atmosphere (Kurr, M., et al., Arch Microbiol, 156:239-47 (1991)). The discovery of Methanopyrus showed that biogenic methanogenesis was possible above 100° C. and could account for isotope discrimination at such temperatures (Huber, R., et al.,. Nature, 342:833-6 (1989)).

[0007] Certain aspects of M. kandleri biochemistry place this organism aside from other archaea. First, the membrane of M. kandleri consists of a terpenoid lipid (Hafenbradl, D., et al., System Appl Microbiol, 16:165-9 (1993)), which is considered to be the most primitive membrane lipid and is the direct precursor of phytanyl diethers found in the membranes of all other archaea (Wachtershauser, G., et al., Microbiol Rev, 52:452-84 (1988)). Second, M. kandleri contains a high intracellular concentration (1.1 M) of a trivalent anion, cyclic 2,3-diphosphoglycerate, which has been reported to confer activity and stability at high temperatures to M. kandleri enzymes (Shima, S., et al., Arch Microbiol, 170:469-72 (1998)). Finally, M. kandleri has several unique enzymes, the most notable ones being the novel type 1B DNA topoisomerase V and the two-subunit reverse gyrase (Slesarev, A. I., et al., Nature, 364:735-7 (1993); Belova, G. I., et al., Proc Natl Acad Sci, USA 98:6015-20 (2001); Slesarev, A. I., et al., Methods Enzymol, 334:17992 (2001); Kozyavkin, S. A., et al., J Biol Chem, 269:11081-9 (1994); and Krah, R., et al., Proc Natl Acad Sci USA, 93:106-10 (1996)).

[0008] Perhaps the most distinctive feature of M. kandleri is its apparent position in the archaeal phylogeny. Several analyses, based on phylogenetic trees for 16S rRNA and the presence/absence of an 11-amino-acid insertion in EF-1α placed M. kandleri close to the root of the Euryarchaeota and did not suggest any specific affinity with other archaeal methanogens (Burggraf, S., et al., System Appl Microbiol, 14:346-51 (1991); Rivera, M. C., et al., Int J Syst Bacteriol, 46:348-51 (1996); and Nolling, J., et al., Int J Syst Bacteriol, 46:1170-3 (1996)). Furthermore, some signatures shared with Crenarchaeota were noticed in the 16S RNA sequence of M. kandleri. (Burggraf, S., et al., System Appl Microbiol, 14:346-51 (1991)). In contrast, the methyl coenzyme M reductase operon of M. kandleri consists of genes that are unique to archaeal methanogens (Polushin, N., et al., Nucleosides Nucleotides Nucleic Acids, 20:973-6 (2001)). The genome comparison reported here reveals clustering of M. kandleri with the other methanogens in phylogenetic trees based on concatenated alignments of ribosomal proteins, which, together with the congruence of the sets of predicted genes, suggests that this group is monophyletic. However, M. kandleri appears to be a “minimalist” organism whose regulatory and signaling systems are generally scaled down compared to those of other archaea. The comparative genome analysis of M. kandleri, M. jannaschii and M. thermoautotrophicus resulted in the delineation of a distinct set of genes characteristic of archaeal methanogens.

### SUMMARY OF THE INVENTION

[0009] This invention provides the genomic sequences of M. kandleri. The sequence information is useful for a variety of diagnostic and analytical methods. The genomic sequence may be embodied in a variety of media, including computer readable forms, or as a nucleic acid comprising a selected fragment of the sequence. Such fragments generally consist of an open reading frame, transcriptional or translational control elements, or fragments derived therefrom. M. kandleri proteins encoded by the open reading frames are useful for diagnostic purposes, as specific and non-specific stabilizing additives for other proteins, as well as for their enzymatic or structural activity.

[0010] Additional objects, advantages, and novel features of this invention shall be set forth in part in the description and examples that follow, and in part will become apparent to those skilled in the art upon examination of the following or may be learned by the practice of the invention. The objects and the advantages of the invention may be realized and attained by means of the instrumentalities and in combinations particularly pointed out in the appended claims.

[0011] Nucleotide or nucleic acid sequences defined herein are represented by one-letter symbols for the bases as follows:
[0012] A (adenine)
[0013] C (cytosine)
[0014] G (guanine)
[0015] T (thymine)
[0016] U (uracil)
[0017] M (A or C)
[0018] R (A or G)
[0019] W (A or T/U)
[0020] S (C or G)
[0021] Y (C or T/U)
[0022] K (G or T/U)
[0023] V (A or C or G; not T/JU)
[0024] H (A or C or T/U; not G)
[0025] D (A or G or T/U; not C)
[0026] B (C or G or T/U; not A)
[0027] N (A or C or G or T/U) or (unknown)

[0028] Peptide and polypeptide sequences defined herein are represented by one-letter or three symbols for amino acid residues as follows:

[0029] A/Ala (alanine); R/Arg (arginine); N/Asn (asparagine); D/Asp (aspartic acid); C/Cys (cysteine); Q/Gln (glutamine); E Glu (glutamic acid); G Gly (glycine); H/His (histidine); I/Ile (isoleucine); L/Leu (leucine); K/Lys (lysine); M/Met (methionine); F/Phe (phenylalanine); P/Pro (proline); S/Ser (serine); T/Thr (threonine); W/Trp (tryptophan); Y/Tyr (tyrosine); V/Val (valine); X/Xaa (frame shift); and U/Sec (selenocysteine).

[0030] The present invention may be more fully understood by reference to the following detailed description of the invention, non-limiting examples of specific embodiments of the invention and the appended figures.

### BRIEF DESCRIPTION OF THE DRAWINGS

[0031] The accompanying drawings, which are incorporated in and form a part of the specifications, illustrate the preferred embodiments of the present invention, and together with the description serve to explain the principles of the invention.

[0032] In the Drawings:

[0033] FIG. 1 illustrates the expression and purification of RPA from E. coli cells.

[0034] FIG. 2 illustrates DNA-binding activity of RPA analyzed by 8% native PAGE, stained with fluorescein. Lane 1, RPA, 1.7 mM (I); lane 2, PDYE, 0.87 mM; lane 3, (I)+ PDYE; lane 4, (II)+ PDYE; lane 5, RPA, 2.4 mM (II); lane 6, (III)+ PDYE; lane 7, RPA, 6 mM (III).

[0035] FIG. 3 illustrates Coomassie Blue G-250-stained RPA. Lane 1, RPA, 1.7 mM (I); lane 2, PDYE, 0.87 mM; lane 3, (I)+ PDYE; lane 4, (II)+ PDYE; lane 5, RPA, 2.4 mM (II); lane 6, (III)+ PDYE; lane 7, RPA, 6 mM (III).

[0036] FIG. 4 illustrates the expression and purification of Ligase-1 from E. coli cells.

[0037] FIG. 5 illustrates the expression and purification of Ligase-2 from E. coli cells.

[0038] FIG. 6 illustrates the expression and purification of MCM2_{—}1 from E. coli cells.

[0039] FIG. 7 illustrates the expression and purification of Fen1 from E. coli cells.

[0040] FIG. 8 illustrates the activity of Fen1 from MK Av19.

[0041] FIG. 9 illustrates the expression and purification of Ppa from E. coli cells.

[0042] FIG. 10 illustrates the expression and purification of RFC-S from E. coli cells.

[0043] FIG. 11 illustrates the expression and purification of RFC-L from E. coli cells.

[0044] FIG. 12 illustrates the expression and purification of Pol B from E. coli cells.

[0045] FIG. 13 illustrates DNA polymerase activity of DNA polymerase polB in various media.

[0046] FIG. 14 illustrates the effect of betaine on thermostability of DNA polymerase polB in 1 M potassium glutamate at 100° C.

[0047] FIG. 15 illustrates effect of potassium glutamate on the activity and processivity of DNA polymerase PolB.

[0048] FIG. 16 illustrates a duplex.

[0049] FIG. 17 illustrates a duplex.

[0050] FIG. 18 illustrates the amplification of 110 nt region of ssDNA M13mp18(+) with ALF M13 Universal fluorescent primer (Amersham Pharmacia Biotech) and primer caggaaacagctatgacc (M13 reverse) in the presence of 1 M potassium glutamate with polB DNA polymerase.

[0051] FIG. 19 illustrates the expression and purification of PCNA from E. coli cells.

[0052] FIG. 20 illustrates the effect of PCNA on formation of fluorescent products in primer extension reaction catalyzed by polB DNA polymerase.

[0053] FIG. 21 illustrates the expreesion and purification of Topo I from E. coli cells.

[0054] FIG. 22 illustrates the relaxation of closed circular pBR322 DNA by Mka Topo I in 100 mM NaCl (lane 2) and 1 M KGlu (lane 5) at 80° C.

[0055] FIG. 23 illustrates the expression and purification of MCM2_{—}2 from E. coli cells.

[0056] FIG. 24 illustrates the purification of P41P46complex from E. coli cells.

[0057] FIG. 25 demonstrates primase activity assay for complex p41p46.

### DETAILED DESCRIPTION OF THE PREFERRED EMBODIMENT

[0058] In a first aspect, the invention provides nucleic acid including the M. kandleri nucleotide sequence shown in SEQ ID NO. 1693 in Attachment A hereto. It also provides nucleic acid comprising sequences having sequence identity to the nucleotide sequence disclosed herein. Depending on the particular sequence, the 35 degree of sequence identity is preferably greater than 70% (e.g., 80%, 90%, 92%, 96%, 99% or more). Sequence identity is determined as above disclosed. These homologous DNA sequences include mutants and allelic variants, encoded within the M. kandleri nucleotide sequence set out herein, as well as homologous DNA sequences from other Methanopyrus strains.

[0059] The invention also provides nucleic acid including sequences complementary to those described above (e.g., for antisense, for probes, or for amplification primers).

[0060] Nucleic acid according to the invention can, of course, be prepared in many ways (e.g., by chemical synthesis, from DNA libraries, from the organism itself, etc.) and can take various forms (e.g., single-stranded, double-stranded, vectors, probes, primers, etc.). The term “nucleic acid” includes DNA and RNA, and also their analogs, such as those containing modified backbones, and also peptide nucleic acid (PNA) etc.

[0061] The invention also provides vectors including nucleotide sequences of the invention (e.g., expression vectors, sequencing vectors, cloning vectors, etc.) and host cells transformed with such vectors.

[0062] According to a further aspect, the invention provides a protein including an amino acid sequence encoded within a M. kandleri nucleotide sequence set out herein. It also provides proteins comprising sequences having sequence identity to those proteins. Depending on the particular sequence, the degree of sequence identity is preferably greater than 50% (e.g., 60%, 70%, 80%, 90%, 95%, 99% or more). Sequence identity is determined as above disclosed. These homologous proteins include mutants and allelic variants, encoded within the M. kandleri nucleotide sequence set out herein.

[0063] According to a further aspect, the invention provides highly thermostable polypeptides that work in high temperature and high salt conditions where previously disclosed proteins do not.

[0064] The proteins of the invention can, of course, be prepared by various means (e.g., recombinant expression, purification from cell culture, chemical synthesis, etc.) and in various forms (e.g., native, fusions, etc.). They are preferably prepared in substantially isolated form (i.e., substantially free from other M. kandleri host cell proteins).

[0065] Various tests can assess the in vivo immunogenicity of the proteins of the invention. For example, the proteins can be expressed recombinantly or chemically synthesized and used to screen patient sera by immunoblot. A positive reaction between the protein and patient serum indicates that the patient has previously mounted an immune response to the protein in question; i.e., the protein is an immunogen. This method can also be used to identify immunodominant proteins.

[0066] The invention also provides nucleic acid encoding a protein of the invention.

[0067] In a further aspect, the invention provides a computer, a computer memory, a computer storage medium (e.g., floppy disk, fixed disk, CD-ROM, etc.), and/or a computer database containing the nucleotide sequence of nucleic acid according to the invention. Preferably, it contains one or more of the M. kandleri nucleotide sequences set out herein.

[0068] This may be used in the analysis of the M. kandleri nucleotide sequences set out herein. For instance, it may be used in a search to identify open reading frames (ORFs) or coding sequences within the sequences.

[0069] In a further aspect, the invention provides a method for identifying an amino acid sequence, comprising the step of searching for putative open reading frames or protein-coding sequences within a M. kandleri nucleotide sequence set out herein. Similarly, the invention provides the use of a M. kandleri nucleotide sequence set out herein in a search for putative open reading frames or protein-coding sequences.

[0070] A search for an open reading frame or protein-coding sequence may comprise the steps of searching a M. kandleri nucleotide sequence set out herein for an initiation codon and searching the upstream sequence for an in-frame termination codon. The intervening codons represent a putative protein-coding sequence. Typically, all six possible reading frames of a sequence will be searched.

[0071] An amino acid sequence identified in this way can be expressed using any suitable system to give a protein. This protein can be used to raise antibodies which recognize epitopes within the identified amino acid sequence. These antibodies can be used to screen M. kandleri to detect the presence of a protein comprising the identified amino acid sequence.

[0072] Furthermore, once an ORF or protein-coding sequence is identified, the sequence can be compared with sequence databases. Sequence analysis tools can be found at NCBI (http://www.ncbi.nlm.nih.gov) e.g., the algorithms BLAST, BLAST2, BLASTn, BLASTp, tBLASTn, BLASTx, & tBLASTx. See also Altschul, et al., “Gapped BLAST and PSI-BLAST: new generation of protein database search programs,” Nucleic Acids Research, 25:2289-3402 (1997). Suitable databases for comparison include the nonredundant GenBank, EMBL, DDBJ and PDB sequences, and the nonredundant GenBank CDS translations, PDB, SwissPot, Spupdate and PIR sequences. This comparison may give an indication of the function of a protein.

[0073] Hydrophobic domains in an amino acid sequence can be predicted using algorithms such as those based on the statistical studies of Esposti et al. Critical evaluation of the hydropathy of membrane proteins Eur J Biochem, 190:207-219 (1990). Hydrophobic domains represent potential transmembrane regions or hydrophobic leader sequences, which suggest that the proteins may be secreted or be surface-located. These properties are typically representative of good immunogens.

[0074] Similarly, transmembrane domains or leader sequences can be predicted using the PSORT algorithm (http://psort/nibb/ac/ip), and functional domains can be predicted using the MOTIFS program (GCG Wisconsin & PROSITE).

[0075] The invention also provides nucleic acid including an open reading frame or protein-coding sequence present in a M. kandleri nucleotide sequence set out herein. Furthermore, the invention provides a protein including the amino acid sequence encoded by this open reading frame or protein-coding sequence.

[0076] According to a further aspect, the invention provides antibodies, which bind to these proteins. These may be polyclonal or monoclonal and may be produced by any suitable means known to those skilled in the art.

[0077] The antibodies of the invention can be used in a variety of ways, e.g., for confirmation that a protein is expressed, or to confirm where a protein is expressed. Labeled antibody (e.g., fluorescent labeling for FACS) can be incubated with intact bacteria and the presence of label on the bacterial surface confirms the location of the protein, for instance.

[0078] According to a further aspect, the invention provides compositions including protein, antibody, and/or nucleic acid according to the invention. These compositions may be suitable as vaccines, as immunogenic compositions, or as diagnostic reagents.

[0079] The invention also provides nucleic acid, protein, or antibody according to the invention for use as medicaments (e.g., as vaccines) or as diagnostic reagents.

[0080] According to a further aspect, the invention provides compositions including M. kandleri protein(s) and other proteins. These compositions, both covalent and non-covalent, may be more stable and may work in broader salt and pH conditions than individual proteins.

[0081] According to further aspects, the invention provides various processes.

[0082] A process for producing proteins of the invention is provided, comprising the step of culturing a host cell according to the invention under conditions, which induce protein expression. A process which may further include chemical synthesis of proteins and/or chemical synthesis (at least in part) of nucleotides.

[0083] A process for detecting polynucleotides of the invention is provided, comprising the steps of: (a) contacting a nucleic probe according to the invention with a biological sample under hybridizing conditions to form duplexes; and (b) detecting said duplexes.

[0084] A process for detecting proteins of the invention is provided, comprising the steps of: (a) contacting the antibody according to the invention with a biological sample under conditions suitable for the formation of an antibody-antigen complexes; and (b) detecting said complexes.

[0085] Another aspect of the present invention provides for a process for detecting antibodies that selectably bind to antigens or polypeptides or proteins specific to any species or strain of M. kandleri where the process comprises the steps of: (a) contacting antigen or polypeptide or protein according to the invention with a biological sample under conditions suitable for the formation of an antibody-antigen complexes; and detecting said complexes.

[0086] Having now generally described the invention, the same will be more readily understood through reference to the following examples which are provided by way of illustration, and are not intended to be limiting of the present invention, unless specified.

Directed Genomic Sequencing

[0087] A novel genome sequencing strategy was adopted to sequence M. kandleri strain AV19 (DSM 6324). The Sequence is listed in Attachment A as Seq ID No.: 1693.

[0088] Skimming shotgun Phase. A small insert (2-4 kb) shotgun library in pUC18 cloning vector (SeqWright) was prepared from 150 μg genomic DNA of M. kandleri strain AV19 (DSM 6324) isolated as described (Slesarev, A. I., et al., Nucleic Acids Res, 26:427-30 (1998)). Approximately 1,000 purified plasmid clones and 3,000 unpurified clones (i.e., aliquots of overnight cultures) were sequenced from both ends using dye-terminator chemistry (Applied Biosystems), ThermoFidelase I (Slesarev, A. I., et al., Methods Enzymol, 334:179-92 (2001)) and standard end Fimers (Polushin, N. et al., Nucleosides Nucleotides Nucleic Acids, 20:973-6 (2001); and (Polushin, N., et al., Nucleosides Nucleotides Nucleic Acids, 20:507-14 (2001)); (Fidelity Systems) on an ABI377. A total of 3,986 sequences, corresponding to ˜0.5× coverage, were assembled into 901 contigs using the Phred/Phrap/Consed software (P. Green, unpubl., Ewing, B., et al., Genome Res, 8:186-94 (1998); Ewing, B., et al., Genome Res, 8:175-85 (1998); and Gordon, D., et at., Genome Res, 8:195-202 (1998)). http://qenome.washington.edu).

[0089] Directed sequencing phase. The assembled contigs from the previous phase were used as islands to select Fimers for directed sequencing off the genomic DNA. Eleven rounds of Fimer selection-sequencing-assembly were performed, which allowed the genome to be assembled into 29 contigs with a 2.5× sequencing redundancy. A total of 5,499 Fimers were synthesized during this phase, from which 6,470 chromatograms were obtained. The program PrimoU (http://www.genome.ou.edu/informatics/primou.html) was used to select priming sites at the ends of contigs.

[0090] Gap closure and assembly verification. DNA was isolated from 293 clones of the M. kandleri EMBL3 lambda library (Krah, R., et al., Proc Natl Acad Sci USA, 93:106-10 (1996); and Slesarev, A. I., et al., Nucleic Acids Res, 26:427-30 (1998)). Remaining gaps in the genome, as well as low-quality and single-stranded regions, were closed by directed reads from genomic and lambda DNA. Fimers sequences for whole genome reads and lambda clone custom reads were selected using the Autofinish program (Gordon, D., et al., Genome Res, 8: 195-202 (1998); and Gordon, D., et al., Genome Res, 11: 614-25 (2001)). After generating 1,585 chromatograms, the genome was assembled into a unique contig with an estimated error rate of 0.4/10 kb. This was done with 12,046 reads (˜3.0× coverage). With an additional 2,147 genomic and lambda walking reads, an accuracy of less than one error per 40,000 bases was achieved (total 14,139 reads, 3.3× coverage). Lambda clones covered 85% of the genome, with an average insert size of 14,500 bp (min 12,230; max 19,324). There were no discrepancies between the expected insert lengths in lambda clones and the corresponding regions in the final genome sequence.

[0091] Detailed sequencing protocols are provided for below in the Examples section.

Computational Genome Analysis

[0092] The tRNA genes were identified using the tRNA-SCAN program (Fichant, G. A., et al., J Mol Biol, 220:659-71 (1991)) and the rRNA genes were identified using the BLASTN program (Altschul, S. F., et al., Nucleic Acids Res, 25:3389402 (1997)) with archaeal rRNA as search queries. For the identification of the protein-coding genes, the genome sequence was conceptually translated in 6 frames to generate potential protein products of open reading frames (ORFS) longer than 100 codons (from stop to stop). These potential protein sequences were compared to the database of Clusters of Orthologous Groups (COGs) of proteins using COGNITOR (Tatusov, R. L., et al., Science, 278:631-7 (1997)). After manual verification of the COG assignments and selection of start sites, the validated COG members from M. kandleri were considered protein-coding genes. The COG assignment procedure was repeated for ORF products greater than 60 codons obtained from the intergenic regions. Other potential protein sequences were compared to the non-redundant (NR) protein sequence database using the BLASTP program and to a six-frame translation of unfinished microbial genomes using the TBLASTN program. Those that produced hits with E (expectation) values <0.01 were added to the protein set after an examination of the alignments. Finally, protein-coding regions were predicted using the GeneMarkS (Besemer, J., et al., Nucleic Acids Res. 29:2607-18 (2001)) and SYNCOD (Rogozin, I. B., et al., Gene, 226:129-37 (1999)) programs. The genes predicted with these methods in the regions between evolutionarily conserved genes were added to produce the final protein set. (See Attachment B SEQ ID Nos.; 1-1691) 1-1688 and 1690-1692.

[0093] Protein function prediction was based primarily on the COG assignments. In addition, searches for conserved domains were performed using the CDD-search option of BLAST (http://www.ncbi.nlm.nih.gov/Structure/cdd/wrpsb.cgi), the SMART system (http://smart.embl-heidelberg.de/) (Schultz, J., et al., Proc Natl Acad Sci USA, 95:5857-64 (1998)) and customized position-specific score matrices for different classes of DNA-binding proteins. In-depth, iterative database searches were performed using the PSI-BLAST program (Altschul, S. F., et al., Nucleic Acids Res, 25:3389-402 (1997)). The KEGG database (http://www.genome.ad.jp/kegg/metabolism.html) (Kanehisa, M. et al., Nucleic Acids Res, 28:27-30 (2000)) was used, in addition to the COGs, for the reconstruction of metabolic pathways. Paralogous protein families were identified by single-linkage clustering of M. kandleri proteins after comparing the predicted protein set to itself using the BLASTP program (Makarova, K. S., et al., Microbiol Mol Biol Rev, 65:44-79 (2001)). Signal peptides in proteins were predicted using the SignalP (Nielsen, H., et al., Int J Neural Syst, 8:581-99 (1997)) program and transmembrane helices were predicted using the MEMSAT program (McGuffin, L. J., et al., Bioinformatics, 16:404-5 (2000)). See Table 1, Attachment C).

[0094] Gene orders in archaeal and bacterial genomes were compared using the LAMARCK program (Wolf, Y. I., et al., Genome Res, 11:356-72 (2001)). For phylogenetic analysis, multiple alignments of ribosomal protein sequences were constructed using the T_Coffee program (Notredame, C., et al., J Mol Biol, 302:205-17 (2000)) and concatenated head-to-tail. Maximum likelihood (ML) trees were generated by exhaustive search of all possible topologies using the ProtML program of the MOLPHY package, with the JTT-F model of amino acid substitutions (Adachi, J., et al., Computer Science Monographs 27; (Institute of Statistical Mathematics, Tokyo) (1992)). Bootstrap analysis was performed for each ML tree using the Resampling of Estimated Log-Likelihoods (RELL) method (10000 replications) (Hasegawa, M., et al., J Mol Evol, 32:443-5 (1991)); and (Kishino, H., et al., J. Mol. Evol., 31:151-160 (1990)). The likelihoods of alternative placements of M. kandleri in ML trees were compared using the Kishino-Hasegawa test (Kishino, H., et al., J. Mol. Evol., 31:151-160 (1990)).

Design, Expression, and Purification of Protein Chimeras

[0095] The 5′ to 3′ exonuclease domain of Taq DNA polymerase is a structurally and functionally separate unit (Kim, Y., et al., Nature, 274:612-616 (1995)). Its removal produces active DNA polymerases, the Stoffel fragment and KlenTaq variants with enhanced thermostability and higher fidelity but with low processivity (Gelfand, D. H. and White, T. J. PCR Protocols A Guide to Methods and Applications, ed. Innis, M. A., et al., (Academic Press, NY) (1990); Barnes, W. M. Gene, 112:29-35 (1992)).

[0096] DNA Topoisomerase V from M. kandleri is an extremely thermophilic enzyme whose ability to bind DNA is preserved at very high ionic strengths (Slesarev, A. I., et al., J. Biol. Chem., 269:3295-3303 (1994)). An explicit domain structure, with multiple C-terminal HhH repeats is responsible for DNA binding properties of the enzyme at high salt concentrations (Belova, G. I., et al., Proc Natl. Acad. Sci. USA, 98:6015-6020 (2001); Belova, G. I., et al., J. Biol. Chem., 277:4959-4965 (2002)). Thus, if the inhibition of Taq DNA polymerase, which has only one HhH motif, or its active derivatives (which lack the HhH motif) by salts is due to the inability of these enzymes to bind DNA, the transfer of HhH domain(s) derived from Topo V to Taq polymerase catalytic domain would restore the DNA polymerase at high salt concentrations.

[0097] In one embodiment, the chimeric DNA polymerase has a DNA polymerase domain that is thermophilic, e.g., is the DNA polymerase domain present in a thermophilic DNA polymerase, such as one from the DNA polymerase in Thermus aquaticus, Thermus thermophilus, Pfu DNA polymerase, Vent DNA polymerase, or Bacillus sterothermophilus DNA polymerase. The amino acid sequence comprising one or more HhH domains, when bound to the DNA polymerase, causes an increase in the processivity of the chimeric DNA polymerase. Five protein chimeras (also referred to herein as “hybrid proteins” “hybrid enzymes” or “chimeric constructs”) containing either the Stoffel fragment of Taq DNA polymerase or whole size Pfu polymerase and a different number of HhH motifs derived from Topo V were designed. Specifically, the designed chimeras are TopoTaq, containing HhH repeats H-L of Topo V (10 HhH motifs) linked to the N-terminus of the Stoffel fragment; TaqTopoC1 comprising Topo V's repeats B-L (21 HhH motifs) linked to the C-terminus of the Stoffel fragment, TaqTopoC2 comprising Topo Vs repeats E-L (16 HhH motifs) linked to the C-terminus of the Stoffel fragment, TaqTopoC3 comprising Topo Vs repeats H-L (10 HhH motifs) linked to the C-terminus of the Stoffel fragment, and PfuC2 comprising repeats E-L at the C-terminus of the Pfu polymerase. Repeats are designated as in (Belova, G. I., et al., Proc Natl. Acad. Sci. USA, 98:6015-6020 (2001). Repeats H-L (also known as Topo34) and F-L with a half of the repeat E are dispensable for the topoisomerase activity of Topo V (Belova, G. I., et al., J. Bio. Chem., 277:4959-4965 (2002) The overall structures of HhH domains are likely the same as in native Topo V, since the domains are resistant to proteolysis both in Topo V and when expressed separately (Topo 34; ((Belova, G. I., et al., J. Bio. Chem., 277:4959-4965 (2002). Also, it was thought that all Topo V domains have high internal stability in order to be functional at extremely high temperatures.

[0098] The chimeras were expressed in E. coli BL21 pLysS and purified using a simple two-step procedure. The purification procedure takes advantage of the extreme thermal stability of recombinant proteins that allows the lysates to be heated and about 90% of E. coli proteins to be removed by centrifugation. The second step involves a heparin-sepharose chromatography. Due to the high affinity of Topo Vs HhH repeats to heparin Slesarev, A. I., et al., J. Biol. Chem., 269:3295-3303 (1994), the chimeras elute from a heparin column around 1.25M NaCl to give nearly homogeneous protein preparations (>95% purity). All expressed constructs possessed high DNA polymerase activity that was comparable to that of commercial Taq DNA polymerase.

[0099] In one embodiment, the chimeric proteins of this invention may comprise a DNA polymerase fragment linked directly end-to-end to the HhH domain. Chemical means of joining the two domains are described, e.g., in Bioconjugate Techniques, Hermanson, Ed., Academic Press (1996), which is incorporated herein by reference. These include, for example, derivitization for the purpose of linking the moieties to each other by methods well known in the art of protein chemistry, such as the use of coupling reagents. The means of linking the two domains may also comprise a peptidyl bond formed between moieties that are separately synthesized by standard peptide synthesis chemistry or recombinant means. The chimeric protein itself can also be produced using chemical methods to synthesize an amino acid sequence in whole or in part, e.g., using solid phase techniques such as the Merrifield solid phase synthesis method.

[0100] Alternatively, the DNA polymerase fragment can be linked indirectly via an intervening linker such as an amino acid or peptide linker. The linking group can be a chemical crosslinking agent, including, for example, succinimidyl-(N-maleimidomethyl)-cyclohexane-1-carboxylate (SMCC). The linking group can also be an additional amino acid sequence. Other chemical linkers include carbohydrate linkers, lipid linkers, fatty acid linkers, polyether linkers, e.g. PEG, etc. The linker moiety may be designed or selected empirically to permit the independent interaction of each component DNA-binding domain with DNA without steric interference. A linker may also be selected or designed so as to impose specific spacing and orientation on the DNA-binding domains. The linker may be derived from endogenous flanking peptide sequence of the component domains or may comprise one or more heterologous amino acids. Linkers may be designed by modeling or identified by experimental trial.

[0101] As demonstrated in the discussion and examples provided below, this invention also provides methods of amplifying a nucleic acid by thermal cycling such as in a polymerase chain reaction (PCR) or in DNA sequencing. The methods include combining the nucleic acid with a chimeric DNA polymerase having a DNA polymerase linked to an amino acid sequence comprising one or more helix-hairpin-helix (HhH) motifs not naturally associated with said DNA polymerase, wherein said amino acid sequence is derived from Topoisomerase V. The nucleic acid and said chimeric DNA polymerase are combined in an amplification reaction mixture under conditions that allow for amplification of the nucleic acid. Such methods are well known to those skilled in the art and need not be described in further detail.

HhH Domains Confer DNA Polymerase Activity on Chimeras in High Salts

[0102] The polymerase activities of the four chimeras were tested by measuring initial rates of primer extension reactions. The reactions were carried out at low concentrations of substrate, when the initial rates were proportional both to total protein and PTJ concentrations. When [PTJ] is much less than Kmₐₚₚ, the initial rate is determined as in Equation 1:
v₁=kₐₚₚ/Kmₐₚₚ*[Eₜ]*[PTJ]₁ Eq. 1
[0103] where Kmₐₚₚ and kₐₚₚ are apparent Michaelis and catalytic constants, respectively.

[0104] The concentrations of sodium chloride (NaCl), potassium chloride (KCl) and potassium glutamate (K-Glu) were varied to assess inhibition of the Stoffel fragment and KlenTaq, and the four chimeras by salts, and to estimate the effects of the HhH domains.

[0105] Table 2 shows the inhibition constants (Kᵢ) and the cooperativity factors (a) of Taq DNA polymerase, Taq DNA polymerase fragments (Stoffel fragment and KlenTaq), the four Taq-Topo V chimeras, and Pfu and PfuC2 polymerases determined from the analysis of initial rates of primer extension reactions in salts using the DNA duplex of FIG. 16. Experimental values of initial polymerization rates were analyzed by nonlinear regression analysis using Equation 2:

$$v = \frac{{v}_{o}}{1 + {( \frac{[ Salt ]}{{K}_{i}} )}^{α}} \qquad Eq . 2$$

where v and v₀ are initial primer extension rates with and without salt, respectively, Kᵢ is the apparent inhibition constant; and α is the cooperativity parameter. The values for Kᵢ and a are listed in Table 2.

[0106] In Table 2, to take into account the activation of Pfu polymerase and the PfuC2 hybrid by KGlu (data entries marked with an asterisk (*), the experimental values of initial polymerization rates were analyzed by nonlinear regression using the Equation 3:

$$v = \frac{{v}_{o} • ( 1 + β \cdot {[ Salt ]}^{y}}{1 + {( \frac{[ Salt ]}{{K}_{i}} )}^{α}} \qquad Eq . 3$$

[0107] where v and v₀ are initial primer extension rates with and without salt, respectively; Kᵢ is an apparent inhibition constant, α is a parameter of cooperativity, β and γ are parameters of activation. Since γ≅2, it is likely that two ions of Glu⁻ bind to the Pfu polymerase catalytic domain without inhibiting the polymerase activity.

TABLE 2
Parameters of inhibition of Taq and Pfu DNA polymerases,
and TopoTaq and PfuC2 chimeras by salts

| | NaCl | | KCl | | K-Glu | |
|---|---|---|---|---|---|---|
| Protein | Kᵢ | α | Kᵢ | A | Kᵢ | α |
| TopoTaq | 241.3 ± 14 | 7.04 ± 1.4 | 291.1 ± 10 | 6.45 ± 0.6 | 1403.0 ± 20 | 6.03 ± 0.4 |
| TaqTopoC1 | 228.4 ± 6 | 4.27 ± 0.2 | 231.2 ± 12 | 5.02 ± 0.6 | 1730.0 ± 125 | 2.45 ± 0.6 |
| TaqTopC2 | 238.4 ± 3 | 6.77 ± 0.2 | 251.0 ± 6 | 8.97 ± 0.6 | 1164.5 ± 42 | 4.34 ± 0.5 |
| TaqTopC3 | 69.0 ± 14 | 1.86 ± 0.2 | 187.7 ± 2 | 3.87 ± 0.1 | 295.8 ± 92 | 1.21 ± 0.2 |
| Taq | 138.7 ± 6 | 3.24 ± 0.5 | 161.0 ± 6 | 3.50 ± 0.2 | 610 ± 51 | 4.45 ± 0.3 |
| Polymerase | | | | | | |
| Stoffel | 38.6 ± 3 | 3.45 ± 0.2 | 45.8 ± 4 | 2.92 ± 0.1 | 59.6 ± 38 | 1.47 ± 0.4 |
| Fragment | | | | | | |
| KlenTaq | 40.0 ± 5 | 1.83 ± 0.1 | 32.7 ± 7 | 1.49 ± 0.2 | 71.0 ± 24 | 0.89 ± 0.1 |
| Pfu | 51.5 ± 1 | 2.39 ± 0.1 | 42.6 ± 1 | 3.65 ± 0.1 | 42.8* ± 6 | 3.24 ± 0.2 |
| polymerase | | | | | | |
| PfuC2 | 159.6 ± 33 | 3.62 ± 0.8 | 176.8 ± 3 | 4.68 ± 0.1 | 424.8* ± 9 | 5.76* ± 0.2 |

[0108] For Taq polymerase, inhibition constants (Kᵢ) for NaCl and KCl are essentially the same, yet substituting KCl with KGlu increases the Kᵢ 4-fold (Table 2). Hence, Taq polymerase is sensitive to anions. The cooperativity parameter α was very similar for all salts tested and suggests that as many as four anions bound simultaneously to the protein are involved.

[0109] The Stoffel and KlenTaq fragments of Taq DNA polymerase have almost equal sensitivities to chloride ions, which is about four times higher that the sensitivity of Taq polymerase to chloride ions. Potassium glutamate inhibited these fragments only about 1.5 to 2 times less efficiently than NaCl or KCl, implying that the HhH domain can be responsible for the resistance of Taq polymerase to glutamate ions. It was observed that KlenTaq had consistently lower values of the cooperativity parameter α than the Stoffel fragment, suggesting that the additional N-terminal amino acids could mask some anion-binging sites on the catalytic domain.

[0110] As shown in Table 2, TopoTaq has higher inhibition constants (Kᵢ) in salts as compared with Taq polymerase, and may require six to seven anions to be bound for inhibition. As a result, TopoTaq is active at much higher salt concentrations than Taq DNA polymerase. For example, a 20% inhibition of primer extension reaction occurs at about 200 mM NaCl for TopoTaq versus about 90 mM NaCl for Taq DNA polymerase. The TopoTaq chimera also displays little distinction between sodium and potassium cations and is less sensitive to glutamate anions versus chloride anions.

[0111] It was observed that the 21 and 16 HhH motifs at the COOH terminus of the Stoffel fragment in TaqTopoC1 and TaqTopoC2, respectively, also increase the polymerase activities of chimeras in the presence of salts. For example, 20% inhibition occurred at about 160 mM NaCl for TaqTopoC1 and at about 195 mM NaCl for TaqTopoC2. Similar to Taq polymerase, the TaqTopoC1 and TaqTopoC2 chimeras show no difference in inhibition by KCl versus NaCl (with the cooperativity parameter α about equal to 5), and glutamate anions were much more preferable than chloride anions. However, the cooperativity parameter for the TaqTopoC1 and TaqTopoC2 chimeras in the case of glutamate is lower compared to that of Taq polymerase or TopoTaq, suggesting that only two glutamate ions are involved in the rate inhibition.

[0112] TaqTopoC3 behaves differently in salts than TaqTopoC1 and TaqTopoC2. Although inhibition of TaqTopoC3 by KCl is similar to that of TaqTopoC1 or TaqTopoC2 (with α≈5, but with a slightly lower Kᵢ similar to that of Taq DNA polymerase), replacement of potassium ions by sodium ions results in a much stronger inhibition of the TaqTopoC3 polymerase activity and, at the same time, decreases the number of inhibiting ions to about 2. Consequently, just 30 mM NaCl inhibits the enzyme by 20%. TaqTopoC3 has about a fivefold relative decrease in sensitivity to K-Glu with respect to NaCl (but not to KCl), which is similar to other hybrids. However, in case of glutamate no cooperativity at all was found, suggesting that only one glutamate ion per molecule is involved in the inhibition of TaqTopoC3.

[0113] Introduction of C-terminal domains of Topo V into the hybrid proteins significantly extends the range of salt concentrations for the polymerase activity. This effect is due to the increase of both K, and cc, allowing chimeras to maintain their full activity at high salt concentrations. Raising the number of HhH motifs from 11 to 23 at the COOH-terminus of the Stoffel fragment made the hybrid enzymes progressively more resistant to salts. TopoTaq had the highest resistance to chloride-containing salts.

[0114] The sensitivity of Pfu DNA polymerase to salts was almost identical to that of Stoffel or KlenTaq fragments of DNA polymerase from Thermus aquaticus, possibly indicating the close functional similarity of charged amino acid residues in the active sites of these enzymes from different structural families. Attachment of Topo V HhH domains to C-terminus of Pfu polB significantly increased the resistance of polymerase activity to salts (Table 2). Both Pfu DNA polymerase and the chimera PfuC2 demonstrated virtually indistinguishable curves for KCl versus NaCl, suggesting no role for cations in inhibition. However, the Topo V domains greatly increased the resistance of Pfu pol activity to high levels of KGlu.

[0115] The invention is further illustrated by the following non-limited examples. All scientific and technical terms have the meanings as understood by one with ordinary skill in the art. The specific examples which follow illustrate the methods in which the genomic sequence, polypeptides of the present invention may be prepared and used and are not to be construed as limiting the invention in sphere or scope. The methods may be adapted to variation in order to produce compositions embraced by this invention but not specifically disclosed. Further, variations of the methods to produce the same compositions in somewhat different fashion will be evident to one skilled in the art.

### EXAMPLES

[0116] The examples herein are meant to exemplify the various aspects of carrying out the invention and are not intended to limit the invention in any way.

### M. kandleri AV19 Replication Factor A RPA (MK1441)

Construction of Expression Vector

[0117] pET21d-M.ka-AV19-RPA: 1128 bp RPA cds was PCR-amplified from M. kandleri AV19 genomic DNA using following primers:

(SEQ ID No.:1694)

5′-ATTCCATGGGTGTGAAGCTGATGCGAACGG
and

((SEQ ID No.:1695)

5′-ATAGAATTCACTCAGCTTCCTCTCCTTCACTCTCCTCC.

[0118] NcoI+EcoRI-digested PCR fragment (NcoI and EcoRI sites were introduced in the primers) was cloned into NcoI, EcoRI sites of pET21d vector. Sequencing of several inserts revealed clones carrying the correct sequence. The resulting protein sequence lacks first 56 amino acids of MK1441.

Expression and Purification of Mka RPA

[0119] E. coli strain BL21 pLysS (Novagen) was transformed with expression plasmid. LB medium (2 L) containing 100 μg/ml ampicillin and 34 μg/ml chloramphenicol was inoculated with transformed cells, and the protein expression was induced by adding 1 mM isopropylthio-β-galactoside (IPTG) and carried out at 37° C. for 3 hours. The cells were harvested and dissolved in 60 ml lysis buffer containing 50 mM Tris-HCl pH 8.0, 0.6 M NaCl, 1 mM EDTA, 5 mM β-mercaptoethanol, and protease inhibitors (Roche). The lysate was centrifuged at 38000 g for 20 minutes, heated at 75° C. for 30 minutes, and centrifuged again at 38,000 g for 30 minutes. The supernatant was filtered through a 0.22 μm Millipore filter, diluted to 0.25M NaCl and applied on a Q-Sepharose column (1.6×17 cm), equilibrated with 50 mM Tris pH 7.5, containing 0.25 M NaCl and 2 mM ME. After washing with the same buffer RPA was eluted with linear gradient of 0.25-0.5 M NaCl. Fractions containing RPA were pooled, concentrated by Centriprep, followed by Centricon YM-30, and passed through a Superdex 200 (1.0×30 cm), equilibrated with 50 mM Tris-HCl pH 7.5, containing 0.15M NaCl and 2 mM ME. 15-20 mg of RPA was purified.

[0120] Shown in FIG. 1 is the expression and purification of RPA from E. coli cells. Cell lysate before induction (lane 2), cell lysate after induction (lane 3) and purified protein (lane 4) were analyzed by SDS-PAGE (10% gel) and visualized by Coomassie Blue G-250. Lane 1 is molecular size marker 10-225 kDa (Novagen).

DNA Binding Activity of RPA

[0121] DNA-binding activity was checked with a 20-mer oligonucleotide and analyzed by native PAGE. The data is shown in FIGS. 21 and 22.

[0122] DNA-binding activity of RPA analyzed by 8% native PAGE, stained with fluorescein (FIG. 2) and Coomassie Blue G-250 (FIG. 3) RPA. Lane 1, RPA, 1.7 μM, (I); lane 2, PDYE, 0.87 μM; lane 3, (I)+ PDYE; lane 4, (II)+ PDYE; lane 5, RPA, 2.4 μM, (II); lane 6, (III)+ PDYE; lane 7, RPA, 6 μM (III).

[0123] From the experiments ontitration of 1.5 μM RPA by oligonucleotide in 1×TAE buffer pH 8.0 in the presence of 10% glycerol dissociation constant K_{d} was determined as described in Pavlov & Karam, 1994. K_{d}=0.21±0.15 μM.

### M. kandleri Strain AV19 ATP-Dependent DNA Ligase (MK0999)

Construction of an Expression Vector for Mka Ligase (Variant-1)

[0124] pET21d-Mka-AV19-Ligase1: 1896 bp DNA ligase long variant eds was PCR-amplified from M. kandleri (av19) genomic DNA using following primers:

(SEQ ID No.:1696)

5′-ATTCCATGGTAGGGGTGGTGAACGTGACTCGACCC
and

(SEQ ID No.:1697)

5′-AATGAATTCTAGTGCTTCTGCAGTACTTCCTCGTAGATCCTCC.

NcoI+EcoRI-digested PCR fragment (NcoI and EcoRI sites were introduced in the primers) was cloned into NcoI, EcoRI sites of pET21d vector. Sequencing of several inserts revealed clones carrying the correct sequence. The expressed protein contains additional Met at the N-terminus.
Expression and Purification of Mka DNA Ligase (Variant-1).

[0125] E. coli strain BL21 pLysS (Novagen) was transformed with expression plasmid. LB medium (2 L) containing 100 μg/ml ampicillin and 34 μg/ml chloramphenicol was inoculated with transformed cells, and the protein expression was induced by adding 1 mM isopropylthio-β-galactoside (IPTG) and carried out at 37° C. for 3 hours. The cells were harvested and dissolved in 50 ml lysis buffer containing 50 mM Tris-HCl pH 8.0, 0.6 M NaCl, 1 mM EDTA, 5 mM β-mercaptoethanol, and protease inhibitors (Roche). The lysate was centrifuged at 38000 g for 20 minutes, filtered through a 0.22 μm Millipore filter, diluted to 0.5 M NaCl and applied on a heparin high trap 5 ml column (APB), equilibrated with 50 mM Tris pH 8.0, containing 0.5 M NaCl and 2 mM ME. After washing the column with 50 mM Tris pH 8.0, containing 0.75 M NaCl and 2 mM ME, Ligase-1 was eluted with 1.4 M NaCl in the same buffer.

[0126] Shown in FIG. 4 is the expression and purification of Ligase-1 from E. coli cells. Cell lysate before induction (lane 4), cell lysate after induction (lane 3) and purified protein (lane 2) were analyzed by SDS-PAGE (10% gel) and visualized by Coomassie Blue G-250. Lane 1 is molecular size marker 10-225 kDa (Novagen).

Construction of an Expression Vector for Mka Ligase (Variant-2)

pET21d-M.ka-AV19-Lig2:

[0127] 1677 bp DNA ligase long variant cds was PCR-amplified from M. kandleri (av19) genomic DNA using following primers:

(SEQ ID No.:1698)

5′-TATCCATGGTGTACTACTCGTCCCTGGCGGAGGC
and

(SEQ ID No.:1699)

5′-AATGAATTCTAGTGCTTCTGCAGTACTTCCTCGTAGATCCTCC.

NcoI+EcoRI-digested PCR fragment (NcoI and EcoRI sites were introduced in the primers) was cloned into NcoI, EcoRI sites of pET21d vector. Sequencing of several inserts revealed clones carrying the correct sequence. The expressed protein contains an additional Met at the N-terminus.
Expression and Purification of Mka DNA Ligase (variant-2).

[0128] E. coli strain BL21 pLysS (Novagen) was transformed with expression plasmid. LB medium (2 L) containing 100 μg/ml ampicillin and 34 μg/ml chloramphenicol was inoculated with transformed cells, and the protein expression was induced by adding 1 mM isopropylthio-β-galactoside (IPTG) and carried out at 37° C. for 3 hours. The cells were harvested and dissolved in 60 ml lysis buffer containing 50 mM Tris-HCl pH 8.0, 0.6M NaCl, 1 mM EDTA, 5 mM β-mercaptoethanol, and protease inhibitors (Roche). The lysate was centrifuged at 38000 g for 20 minutes, heated at 75° C. for 30 minutes, and centrifuged again at 38000 g for 30 minutes. The supernatant was filtered through a 0.22 μm Millipore filter, diluted to 0.3M NaCl and applied on a heparin high trap 5 ml column (APB), equilibrated with 50 mM Tris pH 7.5, containing 0.3 M NaCl and 2 mM ME. After washing with the same buffer, the column was washed with 1 M NaCl, then Ligase was eluted with 1.4 M NaCl in the same buffer. Fractions containing Ligase were passed through a Superdex 200 (1.0×30 cm), equilibrated with 50 mM Tris-HCl pH 7.5, containing 0.15M NaCl and 2 mM ME.

[0129] Shown in FIG. 5 is the expression and purification of Ligase-2 from E. coli cells. Cell lysate before induction (lane 2), cell lysate after induction (lane 3) and purified protein (lane 4) were analyzed by SDS-PAGE (10% gel) and visualized by Coomassie Blue G-250. Lane 1 is molecular size marker 10-225 kDa (Novagen).

### M. kandleri AV19 ATP-Dependent Helicase MCM2_{—}1 (MK0965)

Construction of an Expression Vector for Helicase MCM2_{—}1

pET21d-M.ka-AV19-MCM2_{—}1:

[0130] 1962 bp MCM-1 cds was PCR-amplified from M. kandleri (av19) genomic DNA using following primers:

(SEQ ID No.:1700)

5′-AATCCATGGAGCGTGAGTTCGAAGAGGCTCTCA
and

(SEQ ID No.:1701)

5′-AATGAATTCACATCGGGAGGTACACTCCGGGC.

[0131] NcoI-incompletely digested and EcoRI-digested PCR fragment (NcoI and EcoRI sites were introduced in the primers; additional NcoI site is presented in the cds) was cloned into NcoI, EcoRI sites of pET21d vector. Sequencing of several inserts revealed clones carrying the correct sequence.

Expression and Purification of MCM2_{—}1

[0132] E. coli strain BL21 pLysS (Novagen) was transformed with expression plasmid. LB medium (2 L) containing 100 μg/ml ampicillin and 34 μg/ml chloramphenicol was inoculated with transformed cells, and the protein expression was induced by adding 1 mM isopropylthio-β-galactoside (IPTG) and carried out at 37° C. for 3 hours. The cells were harvested and dissolved in 60 ml lysis buffer containing 50 mM Tris-HCl pH 8.0, 0.6M NaCl, 1 mM EDTA, 5 mM β-mercaptoethanol, and protease inhibitors (Roche). The lysate was centrifuged at 38000 g for 20 minutres, heated at 75° C. for 30 minutes, and centrifuged again at 38000 g for 30 minutes. The supernatant was filtered through a 0.22 μm Millipore filter, diluted to 0.3M NaCl and applied on a Q-Sepharose column (1.6×17 cm), equilibrated with 50 mM Tris pH 7.5, containing 0.3 M NaCl and 2 mM ME. After washing with the same buffer MCM2_{—}1 was eluted with linear gradient of 0.3-1.0 M NaCl. Fractions containing MCM2_{—}1 were pooled, concentrated by Centriprep, followed by Centricon YM-30, and passed through a Superdex 200 (1.0×30 cm), equilibrated with 50 mM Tris-HCl pH 7.5, containing 0.15M NaCl and 2 mM ME. MCM2_{—}1-containing fractions were applied on a heparin high trap 5 ml column (APB), equilibrated with 50 mM Tris pH 7.5, containing 0.15 M NaCl and 2 mM ME. After washing column with the same buffer, MCM2_{—}1 was eluted with linear gradient of 0.3-1.0 M NaCl in the same buffer.

[0133] Shown in FIG. 6 is the expression and purification of MCM2_{—}1 from E. coli cells. Cell lysate before induction (lane 2), cell lysate after induction (lane 3) and purified protein (lane 4) were analyzed by SDS-PAGE (10% gel) and visualized by Coomassie Blue G-250. Lane 1 is molecular size marker 10-225 kDa (Novagen).

### M. kandleri 5′-3′ Exonuclease Fen1 (MK0566)

Construction of an Expression Vector for 5′-3′ Exonuclease Fen1

pET21d-M.ka-AV19-Fen1:

[0134] 1077 bp Fen1 cds was PCR-amplified from M. kandleri (av19) genomic DNA using following primers:

(SEQ ID No.:1702)

5′-ATTCCATGGTTCGATCCACAGGGGTTCCTGGAGG
and

(SEQ ID No.:1703)

5′-ATAGAATTCAGAAGAACGCGTCCAGGGTCTCTTG.

NcoI+EcoRI-digested PCR fragment (NcoI and EcoRI sites were introduced in the primers) was cloned into NcoI, EcoRI sites of pET21d vector. Sequencing of several inserts revealed clones carrying the correct sequence. The expressed protein contains an additional Met at the N-terminus.
Expression and Purification of 5′-3′ Exonuclease Fen1

[0135] E. coli strain BL21 pLysS (Novagen) was transformed with expression plasmid. LB medium (2 L) containing 100 μg/ml ampicillin and 34 μg/ml chloramphenicol was inoculated with transformed cells, and the protein expression was induced by adding 1 mM isopropylthio-β-galactoside (IPTG) and carried out at 37° C. for 3 hours. The cells were harvested and dissolved in 100 ml lysis buffer containing 50 mM Tris-HCl pH 8.0, 0.6 M NaCl, 1 mM EDTA, 5 mM β-mercaptoethanol, and protease inhibitors (Roche). The lysate was centrifuged at 38000 g for 20 minutes, heated at 75° C. for 30 minutes, and centrifuged again at 38000 g for 30 minutes. The supernatant was filtered through a 0.22 μm Millipore filter, diluted to 0.25 M NaCl and applied on heparin high trap 5 ml column (APB) equilibrated with 0.25 M NaCl in 50 mM Tris-HCl buffer, pH 8.0, containing 2 mM β-mercaptoethanol. Fen1 was washed with the same buffer, and applied on a β-Sepharose column (1.6×17 cm), equilibrated with 50 mM Tris pH 8.0, containing 0.25 M NaCl and 2 mM ME. After washing with the same buffer Fen1 was eluted with linear gradient of 0.25-0.5 M NaCl. Fractions containing Fen1 were pooled, concentrated by Centricon YM-30, and passed through a Superdex 200 (1.0×30 cm), equilibrated with 50 mM Tris-HCl pH 7.5, containing 0.15M NaCl and 2 mM ME.

[0136] Shown in FIG. 7 is the expression and purification of Fen1 from E. coli cells. Cell lysate before induction (lane 2), cell lysate after induction (lane 3) and purified protein (lane 4) were analyzed by SDS-PAGE (10% gel) and visualized by Coomassie Blue G-250. Lane 1 is molecular size marker 10-225 kDa (Novagen).

[0137] Activity assay for Fen1. For activity measurements of Fen1 a fluorescein—labeled oligonucleotide has been synthesized:
[0138] *FL-CTATAGGGAGACCGGAATTCGAGCTCGCCCGGGCGAGCTCGAATTCCGTG TATTTATA (SEQ ID No.:1704) which could form various secondary structures shown below that could be cleaved by flap endonucleases:
   Hairpins:
   Most Stable Hairpin:

[0139] ΔG=−38.11 kcal/mol

CCCGCTCGAGCTTAAGGCCAGAGGGATATC-FI* 5′
∥∥∥∥∥∥
GGGCGAGCTCGAATTCCGTGTATTTATA 3′

Dimers:
Most Stable Dimer:

[0140] ΔG=−85.97 kcal/mol

5′ FI*- CTATAGGGAGACCGGAATTCGAGCTCGCCCGGGCGAGCTCGAATTCCGTGTATTTATA 3′
∥∥∥∥∥∥∥∥∥∥∥∥∥∥
3′ ATATTTATGTGCCTTAAGCTCGAGCGGGCCCGCTCGAGCTTAAGGCCAGAGGGATATC-FI* 5′

[0141] FIG. 8 demonstrates the activity of Fen1 from MK Av19. Lane 1—Primer APAV0062 without enzymes; Lane 2—APAV0062 after 10 minutes incubation with 1 u AmpliTaq in the presence of 2 mM Mg²⁺ at 55° C. (positive control); Lane 3—APAV0062 after 10 minutes incubation with Fen I in the presence of 1 mM Mn²⁺ at 55° C.

### M. kandleri AV19 Inorganic Pyrophosphatase Ppa (MK1450)

Construction of an Expression Vector for Inorganic Pyrophosphatase Ppa

pET21d-M.ka-AV19-Ppa:

[0142] 525 bp Pyrophosphatase cds was PCR-amplified from M. kandleri (av19) genomic DNA using following primers:

(SEQ ID No.:1705)

5′-TAACCATGGACCTCTGGAAAGACCTGGAACCGG
and

((SEQ ID No.:1706)

5′-ATAGAATTCACCCGTGCTCCTCCTCGTACAGCT.

[0143] NcoI+EcoRI-digested PCR fragment (NcoI and EcoRI sites were introduced in the primers) was cloned into NcoI, EcoRI sites of pET21d vector. Sequencing of several inserts revealed clones carrying the correct sequence. Expression protein starts with Met-Asp instead of Met-Asn, as it is in MK1450.

Expression and Purification of Inorganic Pyrophosphatase Ppa

[0144] E. coli strain BL21 pLysS (Novagen) was transformed with expression plasmid. LB medium (2 L) containing 100 μg/ml ampicillin and 34 μg/ml chloramphenicol was inoculated with transformed cells, and the protein expression was induced by adding 1 mM isopropylthio-β-galactoside (IPTG) and carried out at 37° C. for 3 hours. The cells were harvested and dissolved in 60 ml lysis buffer containing 50 mM Tris-HCl pH 8.0, 0.6 M NaCl, 1 mM EDTA, 5 mM β-mercaptoethanol, and protease inhibitors (Roche). The lysate was centrifuged at 38000 g for 20 minutes, heated at 75° C. for 30 minutes, and centrifuged again at 38000 g for 30 minutes. The supernatant was filtered through a 0.22 μm Millipore filter, diluted to 0.25 M NaCl and applied on a Q-Sepharose column (1.6×17 cm), equilibrated with 50 mM Tris pH 8.0, containing 0.25 M NaCl and 2 mM MgCl₂. After washing with the same buffer Ppa was eluted with linear gradient of 0.25-1.0 M NaCl. Fractions containing Ppa were pooled, concentrated by Centriprep, followed by Centricon YM-30, and passed through a Superdex 200 (1.0×30 cm), equilibrated with 50 mM Tris-HCl pH 8.0, containing 0.15M NaCl and 2 mM MgCl₂.

[0145] Shown in FIG. 9 is the expression and purification of Ppa from E. coli cells. Cell lysate before induction (lane 2), cell lysate after induction (lane 3) and purified protein (lane 4) were analyzed by SDS-PAGE (10% gel) and visualized by Coomassie Blue G-250. Lane 1 is molecular size marker 10-225 kDa (Novagen).

Ppa Activity

[0146] Purified Ppa has high activity at both 20° C. and 75° C. using potassium pyrophosphate as a substrate in the presence of MgCl₂. The specific activity of the enzyme is about 250 μM min⁻¹ mg⁻¹ at 20° C. and 1440 μM min⁻¹mg⁻¹ at 75° C.

### M. kandleri Replication Factor C Small Subunit RFC-S (MK0006)

Construction of an Expression Vector for RFC-S

pET21d-M.ka-AV19-RFC-S:

[0147] 1905 bp RFC-S cds (containing an intein) was PCR-amplified from M. kandleri (av19) genomic DNA using following primers:

(SEQ ID No.:1707)

5′-ATACTGCAGCCATGGCCGAGCACGAGCTACGCG
and

(SEQ ID No.:1708)

5′-ATAAAGCTTCTACCCGCCGGAGTACTCGTTACCGAGT.

[0148] PstI+HindIII-digested PCR fragment (PstI, NcoI and HindIII sites were introduced in the primers) was cloned into PstI, HindIII sites of pUC19 vector. A pool of isolated plasmid DNAs was used for the next round of PCR aimed to remove intein sequence. Primers

(SEQ ID No.:1709)

5′-GCGTTCAGCTCGAGGAAGTTGTCTCTCCA
and

(SEQ ID No.:1710)

5′-CTCCGATGAGAGGGGTATCGACGTAATTCG

were designed against the intein boundaries in the inverse orientation in order to amplify the cds region without the intein, but still containing the pUC19 sequence. The resulted PCR fragment (ca. 3.7 kb: 989 bp of cds lacking intein+2.7 kb of pUC19 sequence) was circularized, and after transformation of E. coli with this vector, several plasmid DNAs were isolated and sequenced. The correct insert carrying RFC-S cds without the intein was cut out from pUC19 vector DNA by double NcoI+HindIII digestion and cloned into the NcoI+HindIII-digested pET21d vector.
Expression and Purification of RFC-S.

[0149] E. coli strain BL21 pLysS (Novagen) was transformed with expression plasmid. LB medium (2 L) containing 100 μg/ml ampicillin and 34 μg/ml chloramphenicol was inoculated with transformed cells, and the protein expression was induced by adding 1 mM isopropylthio-β-galactoside (IPTG) and carried out at 37° C. for 3 hours. The cells were harvested and dissolved in 70 ml lysis buffer containing 50 mM Tris-HCl pH 8.0, 0.6M NaCl, 1 mM EDTA, 5 mM β-mercaptoethanol, and protease inhibitors (Roche). The lysate was centrifuged at 38,000 g for 20 minutes, heated at 75° C. for 30 minutes, and centrifuged again at 38,000 g for 30 minutes. The supernatant was filtered through a 0.22 μm Millipore filter, diluted to 0.25M NaCl and applied on a Q-Sepharose column (1.6×17 cm), equilibrated with 50 mM Tris pH 7.5, containing 0.25M NaCl and 2 mM ME. After washing with the same buffer RFC-S was eluted with linear gradient of 0.25-1.0 M.

[0150] Shown in FIG. 10 is the expression and purification of RFC-S from E. coli cells. Cell lysate before induction (lane 2), cell lysate after induction (lane 3) and purified protein (lane 4) were analyzed by SDS-PAGE (10% gel) and visualized by Coomassie Blue G-250. Lane 1 is molecular size marker 10-225 kDa (Novagen).

### M. kandleri Replication Factor C Large Subunit RFC-L (MK0006)

Construction of an Expression Vector for RFC-L

pET21d-M.ka-AV19-RFC-L:

[0151] 1539 bp RFC-L cds was PCR-amplified from M. kandleri (av19) genomic DNA using following primers:

(SEQ ID No.:1711)

5′-AATCCATGGTAGCACCGTTGGTCCCTTGGGTTGA
and

(SEQ ID No.:1712)

5′-ATAAAGCTTCAGAAGAACGCGTCTAACGTCCTCTGTTCA.

[0152] NcoI-incompletely digested and HindIII-digested PCR fragment (NcoI and HindIII sites were introduced in the primers; additional NcoI site is presented in the cds) was cloned into NcoI, HindIII sites of pET21d vector. Sequencing of several inserts revealed clones carrying the correct sequence. The expressed protein contains an additional Met at the N-terminus.

Expression and Purification of RFC-L

[0153] E. coli strain BL21 pLysS (Novagen) was transformed with expression plasmid. LB medium (2 L) containing 100 μg/ml ampicillin and 34 μg/ml chloramphenicol was inoculated with transformed cells, and the protein expression was induced by adding 1 mM isopropylthio-β-galactoside (IPTG) and carried out at 37° C. for 3 hours. The cells were harvested and dissolved in 60 ml lysis buffer containing 50 mM Tris-HCl pH 8.0, 0.6M NaCl, 1 mM EDTA, 5 mM β-mercaptoethanol, and protease inhibitors (Roche). The lysate was centrifuged at 38000 g for 20 minutes, filtered through a 0.22 μm Millipore filter, diluted to 0.5M NaCl and applied on a heparin high trap 5 ml column (APB), equilibrated with 50 mM Tris pH 7.5, containing 0.5 M NaCl and 2 mM ME. After washing with the same buffer RFC-L was eluted with shallow linear gradient of 0.5-1.0 M NaCl. Shown in FIG. 11 is the expression and purification of RFC-L from E. coli cells. Cell lysate before induction (lane 2), cell lysate after induction (lane 3) and purified protein (lane 4) were analyzed by SDS-PAGE (10% gel) and visualized by Coomassie Blue G-250. Lane 1 is molecular size marker 10-225 kDa (Novagen).

### M. kandleri AV 19 DNA Polymerase Family B (Mka PolB) (MK1039)

Construction of Expression Vector

[0154] PET21d-Mka-AV19-PolB: 2490 bp PolB cds was PCR-amplified from M. Kandleri AV19 genomic DNA using following primers:

(SEQ ID No.:1713)

5′TATCCATGGGGTTGCTCCGTACAGTGTGGGTAGATTAGCG
and

(SEQ ID No.:1714)

5′CTAGAATTCAGCCGAAGAACTGATCCAGCGTCTT.

[0155] NcoI+EcoRI-digested PCR fragment (NcoI and EcoRI sites were introduced in the primers) was cloned into NcoI, EcoRI sites of pET21d vector. Sequencing of several inserts revealed clones carrying the correct sequence. The PolB protein contains a dipeptide Met-Gly at its N-terminus.

Expression and Purification of Mka PolB

[0156] E. coli strain BL21 pLysS (Novagen) was transformed with expression plasmid. LB medium (2 L) containing 100 μg/ml ampicillin and 34 μg/ml chloramphenicol was inoculated with transformed cells, and the protein expression was induced by adding 1 mM isoprophylthio-β-galactoside (IPTG) and carried out at 37° C. for 3 hours. The cells were harvested and dissolved in 75 ml lysis buffer containing 50 mM Tris-HCl pH 8.0, 0.6 M NaCl. 1 mM EDTA, 5 mM β-mercaptoethanol, and protease inhibitors (Roche). The lysate was centrifuged at 38,000 g for 20 minutes, filtered through a 0.22 μm Millipore filter, diluted to 0.5M NaCl and applied on a heparin high trap 5 ml column (APB), equilibrated with 50 mM Tris pH 8.0, containing 0.5 M NaCl and 2 mM ME. After washing with the same buffer Pol B was eluted with 50 mM Tris pH 8.0, containing 0.75 M NaCl and 2 mM ME.

[0157] Shown in FIG. 12 is the expression and purification of PolB from E. coli cells. Cell lysate before induction (lane 2), cell lysate after induction (lane 3) and purified protein (lane 4) were analyzed by SDS-PAGE (10% gel) and visualized by Coomassie Blue G-250. Lane 1 is molecular size marker 10-225 kDa (Novagen).

DNA Polymerase Activity of PolB

[0158] A primer extension assay was applied with a fluorescent duplex substrate containing a primer-template junction (PTJ). The duplex shown in FIG. 18 was prepared by annealing a 5′-end labeled with fluorescein 20-nt long primer with a 40-nt long template:

[0159] DNA polymerase reaction mixtures (15-20 μl) contained dATP, dTTP, dCTP, and dGTP (1 mM each), 4.5 mM MgCl₂, detergents Tween 20 and Nonidet P-40 (0.2% each), fixed concentrations of PTJ—duplex, other additions, as indicated, and appropriate amounts of polB in 30 mM Tris-HCl buffer pH 8.0 (25° C.). The background reaction mixtures contained all components except DNA polymerases. Primer extensions were carried out for a preset time at 75° C. in PTC-150 Minicycler (MJ Research, Inc.; Waltham, Mass.). 5 μl samples were removed and chilled to 4° C. followed by immediate addition of 20 μl of 20 mM EDTA. The samples were desalted by centrifugation through Sephadex G-50 spun columns, diluted, and analyzed on a ABI Prism 377 DNA sequencer (Applied BioSystems; Foster City, Calif.). For each sample, raw data were extracted from the sequencer trace files with the program Chromas 1.5 (Technelysium Pty Ltd., Australia), and the fluorescent signals were analyzed by our nonlinear regression data analysis programs written in Fortran. The programs applied Powell algorithms to approximate the signals by a number of Gaussian peaks and calculate integral fluorescent intensities for each product peak. The total amount of fluorescent products for each time of incubation was determined, and the initial rates of extension were calculated. PolB was found to carry out DNA synthesis at various conditions of primer extension assay.

Studies of Thermostability of pol B DNA Polymerase

[0160] To determine DNA polymerase activity and thermostability of DNA polymerase polB in various media. Proteins in 25 μl of 20 mM Tris-HCl buffer (pH 8.0 at 25° C.) containing indicated concentrations of salts and betaine were incubated in PTC-150 Minicycler (MJ Research) at 95° C. or 100° C. 4 μl samples were removed at defined times of incubation and assayed for primer extension activity. These activities and stabilities are shown in FIG. 13.

[0161] As demonstrated in FIG. 14, 1 M Betaine was found to stabilize specifically polB DNA polymerase in the presence of potassium glutamate at 100° C. The stabilizing effect of betaine is diminished in the presence of organic solvents DMSO and formamide.

[0162] It was found that potassium glutamate specifically activates polB DNA polymerase and produces about twenty-fold increase of polymerase activity at 0.8 M of the salt. See FIG. 15.

[0163] Studies of Processivity of Pol B DNA Polymerase

[0164] For processivity assays, the primer extension reactions were carried out and analyzed as described above, but after determination of the amount of extended products, the initial rates for appearance of each extended primer were calculated. Then the processivity for each position of the template was determined using equation:

$${p}_{n} = \frac{{\sum }_{i = 1}^{{n}_{max} - n} v ( {I}_{n + i} )}{{\sum }_{i = 0}^{{n}_{max} - n} v ( {I}_{n + i} )} , where v ( {I}_{n + i} ) = \frac{ⅆ {I}_{n + i}}{ⅆ t} ,$$

initial rate of appearance for each extended product, and the processivity equivalence parameter, Pₑ, was calculated for each reaction. Results for various concentrations of potassium glutamate are shown above.

[0165] Exonucleasease Activity of PolB

[0166] A 3′→5′ exonuclease activity of polB polymerase was measured at the same conditions as in the primer extension assay, except omitting dideoxynucleotides. A fluorescent primer:

| | |
|---|---|
| *FL-GTAATACGACTCACTATAGGG | (SEQ ID NO.:1715) |

was incubated with the enzyme at defined times. Then, the amounts of formed products were calculated, and the initial rates of hydrolysis were found, as in case of primer extension. It is interesting that polB was able to cleave off only 9 nucleotides of the primer, that is, the 13-nt primer was the shortest substrate that polB could process.

[0167] Performance of M.K. polB DNA Polymerase in Various Media.

[0168] Initial rates of primer extension reactions shown below in Table 3 demonstrate abolishing of 3′→5′ exonuclease activity of M.K. polB DNA polymerase upon transformation of the enzyme into its glutamate form by buffer exchange on a Sephadex G50 column.

TABLE 3
Initial Rate of Primer Extension, μM/min

| | |
|---|---|
| PolB; 0.5 M NaCl | 0.123 ± 0.003 |
| PolB; 0.5 M NaCl + PCNA | 0.214 ± 0.014 |
| PolB; 1 M KGlu | 2.74 ± 0.18 |
| PolB; 1 M KGlu; dUTP | 1.82 ± 0.09 |
| PolB; 1 M DPG | 2.17 ± 0.16 |

[0169] The next two tables (Table 4 and 5) display effects of various media components on M.K. polB DNA polymerase activity. Initial rates of primer extension reaction were measured as described by Pavlov et al., 2002.

TABLE 4
Initial Rate of Primer Extension, μM/min

| | 0.5 M NaCl | 1 M KGlu |
|---|---|---|
| Pol; NaCl protein | 0.15 ± 0.01 | 2.55 ± 0.31 |
| Exo; NaCl protein | 0.50 ± 0.06 | 1.07 ± 0.06 |
| Pol; KGlu protein | | 2.74 ± 0.18 |
| Exo; KGlu protein | | 0 ± 0 |

[0170] TABLE 5
Inhibition constants in different media

| Chemical | IC₅₀ (M) |
|---|---|
| NaCl | 0.55 |
| KCl | 0.45 |
| LiClO₄ | 0.27 |
| NH₄Ac | 0.56 |
| NH₄OH | <0.03 |

[0171] Conclusions:
[0172] 1. KGlu inhibits the 3′-5′ exonuclease activity of Mka PolB, while NaCl stimulates it.
[0173] 2. KGlu, diphosphoglycerate, and Mka PCNA (see below) increase the polymerase activity of PolB.
[0174] 3. PolB can use dUTP for primer extensions.
[0175] 4. PolB is resistant to aggressive chemicals.

[0176] Activity of Mka PolB DNA Polymerase at Different Temperature

TABLE 6
Initial Rate of Primer Extension, μM/min

| t° C. | Initial Rates |
|---|---|
| 50 | 1.01 ± 0.06 |
| 55 | 1.08 ± 0.09 |
| 60 | 1.12 ± 0.08 |
| 65 | 1.23 ± 0.05 |
| 70 | 1.01 ± 0.07 |
| 75 | 0.95 ± 0.07 |
| 80 | 0.92 ± 0.07 |
| 85 | 0.94 ± 0.07 |
| 90 | 0.71 ± 0.05 |
| 95 | 0.62 ± 0.04 |
| 100 | 0.62 ± 0.06 |
| 105 | 0.55 ± 0.09 |

Table 6 illustrates the dependency of initial rates of primer extension for Duplex 2 shown in FIG. 17 on temperature of the reaction. Initial rates of primer extension reaction were measured as described by Pavlov et al., 2002.

[0177] As once can see from Table 6, Mka PolB can extend primers at temperatures up to 105° C., i.e. above the melting temperature of the duplex.

[0178] FIG. 18 shows the amplification of 110 nt region of ssDNA M13mp18(+) with ALF M13 Universal fluorescent primer (Amersham Pharmacia Biotech) and primer caggaaacagctatgacc (M13 reverse) in the presence of 1 M potassium glutamate with polB DNA polymerase. Cycling: 100° C. for 40 seconds; 50° C. for 30 seconds; 72° C. for 2 minutes; 30 cycles (3, 4, 5 6). The products shown in FIG. 18 were resolved on a 10% sequencing gel with ABI PRISM 377 DNA sequencer.

### M. kandleri AV19 PCNA (MK1030)

Construction of an Expression Vector for Mka DNA Polymerase Sliding Clamp (PCNA)

[0179] pET21a-MKA-PCNA: PCNA was PCR-amplified from M. kandleri genomic DNA using following primers:

(SEQ ID No.:1716)

5′- ATCATTCATATGGTGGAGTTCAGGGCCTACCAG
and

(SEQ ID No.:1717)

5′- AGATATGAATTCAAGGAGGAAGGGTTCACTCCT

[0180] NdeI+EcoRI-digested PCR fragment (NdeI and EcoRI sites were introduced in the primers) was cloned into NdeI, EcoRI sites of the pET21a vector. Sequencing of several inserts revealed clones carrying the correct sequence.

[0181] Expression and Purification of PCNA

[0182] E. coli strain BL21 pLysS (Novagen) was transformed with expression plasmid. LB medium (2 L) containing 100 μg/ml ampicillin and 34 μg/ml chloramphenicol was inoculated with transformed cells, and the protein expression was induced by adding 1 mM isopropylthio-β-galactoside (IPTG) and carried out at 37° C. for 3 hours. The cells were harvested and dissolved in 50 ml lysis buffer containing 50 mM Tris-HCl pH 8.0, 0.6 M NaCl, 1 mM EDTA, 5 mM β-mercaptoethanol, and protease inhibitors (Roche). The lysate was centrifuged at 38,000 g for 20 minutes, filtered through a 0.22 μm Millipore filter, diluted to 0.25 M NaCl and applied on a heparin high trap 5 ml column (APB), equilibrated with 50 mM Tris pH 8.0, containing 0.25 M NaCl and 2 mM ME. PCNA was eluted with the same buffer. Fractions containing PCNA were pooled, concentrated by Centriprep, followed by Centricon YM-30, and passed through a Superdex 200 (1.0×30 cm), equilibrated with 50 mM Tris-HCl pH 8.0, containing 0.5M NaCl and 2 mM MgCl₂.

[0183] Expression and purification of PCNA from E. coli cells is shown in FIG. 19. Cell lysate before induction (lane 2), cell lysate after induction (lane 3) and purified protein (lane 4) were analyzed by SDS-PAGE (10% gel) and visualized by Coomassie Blue G-250. Lane 1 is molecular size marker 10-225 kDa (Novagen).

Interaction of polB with PCNA.

[0184] PolB was incubated with PCNA (final concentration 5.6 μM subunits) in the presence of 100 mM NaCl. The polymerase activity was measured in the primer extension assay and compared to the activity without PCNA added. Even without clamp loader, the interaction of PCNA with PolB was detected as the initial rate of the primer extension increased 1.75 times. The most remarkable, however, was suppression of hydrolysis of the primer annealed to the duplex that occurs as the combined result of 3′-5′ exonuclease activity of polB, its sliding along PTJ, and partial melting of the duplex substrate in the active site of the enzyme shown in FIG. 20. This happens, most likely because PCNA anchors polB on the PTJ and/or prevents partial melting of the PTJ duplex.

### M. kandleri AV19 DNA topoisomerase IA (Topo I) (MK1604)

Construction of an Expression Vector for Topo I

pET21d-M.ka-AV19-Top1:

[0185] 1761 bp Top1 cds was PCR-amplified from M. kandleri genomic DNA using following primers:

(SEQ ID No.:1718)

5′-TATCCATGGCCTCGTCGTCGAAGGAGACG
and

(SEQ ID No.:1719)

5′-TTAGAATTCAGACCACCTTGGCTGACTTCAACTTCTTG.

[0186] NcoI+EcoRI-digested PCR fragment (NcoI and EcoRI sites were introduced in the primers) was cloned into NcoI, EcoRI sites of pET21d vector. Sequencing of several inserts revealed clones carrying the correct sequence.

[0187] Expression, Purification, and Activity of Topo I

[0188] E. coli strain BL21 pLysS (Novagen) was transformed with expression plasmid. LB medium (2 L) containing 100 μg/ml ampicillin and 34 μg/ml chloramphenicol was inoculated with transformed cells, and the protein expression was induced by adding 1 mM isopropylthio-β-galactoside (IPTG) and carried out at 37° C. for 3 hours. The cells were harvested and dissolved in 50 ml lysis buffer containing 50 mM Tris-HCl pH 8.0, 0.6 M NaCl, 1 mM EDTA, 5 mM β-mercaptoethanol, and protease inhibitors (Roche). The lysate was centrifuged at 38000 g for 20 minutes, filtered through a 0.22 μm Millipore filter, diluted to 0.5 M NaCl and applied on a heparin high trap 5 ml column (APB), equilibrated with 50 mM Tris pH 8.0, containing 0.5 M NaCl and 2 mM ME. After washing the column with 50 mM Tris pH 8.0, containing 0.75 M NaCl and 2 mM ME, Topo I was eluted with 1.4 M NaCl in the same buffer.

[0189] Expression and purification of Topo I from E. coli cells is shown in FIG. 21. Cell lysate before induction (lane 2), cell lysate after induction (lane 3) and purified protein (lane 4) were analyzed by SDS-PAGE (10% gel) and visualized by Coomassie Blue G-250. Lane 1 is molecular size marker 10-225 kDa (Novagen).

[0190] Relaxation of closed circular pBR322 DNA by Mka Topo I in 100 mM NaCl (lane 2) and 1 M KGlu (lane 5) at 80° C. shown in FIG. 22. Topo I was incubated with DNA for 10 min. Topoisomers were separated in a 1% agarose gel.

### M. kandleri AV19 ATP-Dependent Helicase MCM2_{—}2 (MK1120)

Construction of an Expression Vector for MCM2_{—}2

PET21d-M.ka-AV19-MCM2_{—}2:

[0191] 1179 bp MCM-2 cds was PCR-amplified from M. kandleri (av19) genomic DNA using following primers:

(SEQ ID No.:1720)

5′-CCATCGGTTCCGGAGGGTAGAGAGAATACG
and

(SEQ ID No.:1721)

5′-ATTGAATTCGACTCAGGGTTTGAGCGACGAGATCCTG.

NcoI-incompletely digested and EcoRI-digested PCR fragment (2 NcoI sites are presented in the coding region of MCM-2 gene, from the first NcoI site the cds begins: CCATGG; the EcoRI site was introduced in the primer) was cloned into NcoI, EcoRI sites of pET21d vector. Sequencing of several inserts revealed clones carrying the correct sequence.

[0192] Expression of MCM2_{—}2. E. coli strain BL21 pLysS (Novagen) was transformed with expression plasmid. LB medium (2 L) containing 100 μg/ml ampicillin and 34 μg/ml chloramphenicol was inoculated with transformed cells, and the protein expression was induced by adding 1 mM isopropylthio-β-galactoside (IPTG) and carried out at 37° C. for 3 hours. The cells were harvested and dissolved in 60 ml lysis buffer containing 50 mM Tris-HCl pH 8.0, 0.6M NaCl, 1 mM EDTA, 5 mM β-mercaptoethanol, and protease inhibitors (Roche). The lysate was centrifuged at 38,000 g for 20 minutes, heated at 75° C. for 30 minutes, and centrifuged again at 38,000 g for 30 minutes.

[0193] Expression and purification of MCM2_{—}2 from E coli cells is shown in FIG. 23. Cell lysate before induction (lane 2) and after induction (lane 3) were analyzed by SDS-PAGE (10% gel) and visualized by Coomassie Blue G-250. Lane 1 is molecular size marker 10-225 kDa (Novagen).

### M. kandleri AV19 Eukaryotic-Type DNA Primase P41P46 (MK0586 and MK1394)

Construction of Expression Vectors for p41 and p46 Subunits

pET21d-M.ka-AV19-p41:

[0194] 948 bp p41 cds was PCR-amplified from M. kandleri (av19) genomic DNA using following primers:

(SEQ ID No.:1722)

5′-TTACCATGGACTTCTATTCGCCAACCTTCCACAGC
and

(SEQ ID No.:1723)

5′-TAAGAATTCACGGCTTAAGCTCCCCCAGCACC.

[0195] NcoI+EcoRI-digested PCR fragment (NcoI and EcoRI sites were introduced in the primers) was cloned into NcoI, EcoRI sites of pET21d vector. Sequencing of several inserts revealed clones carrying the correct sequence. Expression protein should contain Met instead of Leu at its N-terminus.

pET21d-M.ka-AV19-p46:

[0196] 1218 bp p46 short variant cds was PCR-amplified from M. kandleri (av19) genomic DNA using following primers:

(SEQ ID No.:1724)

5′-TATCCATGGGCTCATGGTTCCCCCACGCCCC
and

(SEQ ID No.:1725)

5′-ATAGAATTCATCCGTCGTCGGCCCTAGGTCG.

[0197] NcoI+EcoRI-digested PCR fragment (NcoI and EcoRI sites were introduced in the primers) was cloned into NcoI, EcoRI sites of pET21d vector. Sequencing of several inserts revealed clones carrying the correct sequence. Expression protein should contain Met-Gly instead of Leu-Arg at its N-terminus.

Expression of p41

[0198] E. coli strain BL21 pLysS (Novagen) was transformed with expression plasmid. LB medium (2 L) containing 100 μg/ml ampicillin and 34 μg/ml chloramphenicol was inoculated with transformed cells, and the protein expression was induced by adding 1 mM isopropylthio-β-galactoside (IPTG) and carried out at 37° C. for 3 hours. The cells were harvested and dissolved in 50 ml lysis buffer containing 50 mM Tris-HCl pH 8.0, 0.6M NaCl, 1 mM EDTA, 5 mM β-mercaptoethanol, and protease inhibitors (Roche). The lysate was centrifuged at 38000 g for 20 minutes. The supernatant was filtered through a 0.22 μm Millipore filter.

Expression of p46

[0199] E. coli strain BL21 pLysS (Novagen) was transformed with expression plasmid. LB medium (2 L) containing 100 μg/ml ampicillin and 34 μg/ml chloramphenicol was inoculated with transformed cells, and the protein expression was induced by adding 1 mM isopropylthio-β-galactoside (IPTG) and carried out at 37° C. for 3 hours. The cells were harvested and dissolved in 50 ml lysis buffer containing 50 mM Tris-HCl pH 8.0, 0.6M NaCl, 1 mM EDTA, 5 mM β-mercaptoethanol, and protease inhibitors (Roche). The lysate was centrifuged at 38,000 g for 20 min, heated at 75° C. for 30 minutes, and centrifuged again at 38,000 g for 30 minutes. The supernatant was filtered through a 0.22 μm Millipore filter.

[0200] Purification of p41p46 Complex

[0201] p41 lysate was mixed with p46 lysate approximately 1:1 according to SDS-PAGE, heated at 80° C. for 15 minutes, centrifuged at 38000 g for 15 min, and applied on Heparin-Sepharose Hi Trap 1 ml equilibrated with 50 mM Tris pH 7.5, containing 0.5 M NaCl and 2 mM ME. After washing with the same buffer p41p46complex was eluted with linear gradient of 0.5-1.0 M NaCl.

[0202] Purification of P41P46 complex from E. coli cells is shown in FIG. 24. P41 cell lysate (lane 2), P46 cell lysate (lane 3), P41P46 complex before (lane 4) and after purification (lane 5) were analyzed by SDS-PAGE (10% gel) and visualized by Coomassie Blue G-250. Lane 1 is molecular size marker 10-225 kDa (Novagen).

Assay of Primase Activity of p41p46.

[0203] Primase activity assay for complex p41p46.50 ng/μl single stranded M13 DNA (Amersham) were incubated with complex p41p46 at 75° C. for 45 minutes in the presence of dNTPs (1 mM each) and MgCl₂ (4.5 mM). Then the mixture was desalted using Sephadex G-50 spin column and any primer-template junctions formed by the primase were labeled with fluorescent dideoxinucleotides using SnapShot kit (ABI). The products were desalted with Sephadex G-50 spin columns and resolved on a sequencing gel using ABI 377 sequencer shown in FIG. 25.

[0204] The foregoing description is considered as illustrative only of the principles of the invention. The words “comprise,” “comprising,” “include,” “including,” and “includes” when used in this specification and in the following claims are intended to specify the presence of one or more stated features, integers, components, or steps, but they do not preclude the presence or addition of one or more other features, integers, components, steps, or groups thereof. Furthermore, since a number of modifications and changes will readily occur to those skilled in the art, it is not desired to limit the invention to the exact construction and process shown described above. Accordingly, all suitable modifications and equivalents may be resorted to falling within the scope of the invention as defined by the claims which follow.

[image]

[image]

[image]

[image]

[image]

[image]

[image]

[image]

[image]

[image]

[image]

[image]

[image]

[image]

[image]

[image]

[image]

[image]

[image]

[image]

[image]

[image]

[image]

[image]

[image]

[image]

[image]

[image]

[image]

[image]

[image]

[image]

[image]

[image]

[image]

[image]

[image]

[image]

[image]

[image]

[image]

[image]

[image]

[image]

[image]

[image]

[image]

[image]

[image]

[image]

[image]

[image]

[image]

[image]

[image]

[image]

[image]

[image]

[image]

[image]

[image]

[image]

[image]

[image]

[image]

[image]

[image]

[image]

[image]

[image]

[image]

[image]

[image]

[image]

[image]

[image]

[image]

[image]

[image]

[image]

[image]

[image]

[image]

[image]

[image]

[image]

[image]

[image]

[image]

[image]

[image]

[image]

[image]

[image]

[image]

[image]

[image]

[image]

[image]

[image]

[image]

[image]

[image]

[image]

[image]

[image]

[image]

[image]

[image]

[image]

[image]

[image]

[image]

[image]

[image]

[image]

[image]

[image]

[image]

[image]

[image]

[image]

[image]

[image]

[image]

[image]

[image]

[image]

[image]

[image]

[image]

[image]

[image]

[image]

[image]

[image]

[image]

[image]

[image]

[image]

[image]

[image]

[image]

[image]

[image]

[image]

[image]

[image]

[image]

[image]

[image]

[image]

[image]

[image]

[image]

[image]

[image]

[image]

[image]

[image]

[image]

[image]

[image]

[image]

[image]

[image]

[image]

[image]

[image]

[image]

[image]

[image]

[image]

[image]

[image]

[image]

[image]

[image]

[image]

[image]

[image]

[image]

[image]

[image]

[image]

[image]

[image]

[image]

[image]

[image]

[image]

[image]

[image]

[image]

[image]

[image]

[image]

[image]

[image]

[image]

[image]

[image]

[image]

[image]

[image]

[image]

[image]

[image]

[image]

[image]

[image]

[image]

[image]

[image]

[image]

[image]

[image]

[image]

[image]

[image]

[image]

[image]

[image]

[image]

[image]

[image]

[image]

[image]

[image]

[image]

[image]

[image]

[image]

[image]

[image]

[image]

[image]

[image]

[image]

[image]

[image]

[image]

[image]

[image]

[image]

[image]

[image]

[image]

[image]

[image]

[image]

[image]

[image]

[image]

[image]

[image]

[image]

[image]

[image]

[image]

[image]

[image]

[image]

[image]

[image]

[image]

[image]

[image]

[image]

[image]

[image]

[image]

[image]

[image]

[image]

[image]

[image]

[image]

[image]

[image]

[image]

[image]

[image]

[image]

[image]

[image]

[image]

[image]

[image]

[image]

[image]

[image]

[image]

[image]

[image]

[image]

[image]

[image]

[image]

[image]

[image]

[image]

[image]

[image]

[image]

[image]

[image]

[image]

[image]

[image]

[image]

[image]

[image]

[image]

[image]

[image]

[image]

[image]

[image]

[image]

[image]

[image]

[image]

[image]

[image]

[image]

[image]

[image]

[image]

[image]

[image]

[image]

[image]

[image]

[image]

[image]

[image]

[image]

[image]

[image]

[image]

[image]

[image]

[image]

[image]

[image]

[image]

[image]

[image]

[image]

[image]

[image]

[image]

[image]

[image]

[image]

[image]

[image]

[image]

[image]

[image]

[image]

[image]

[image]

[image]

[image]

[image]

[image]

[image]

[image]

[image]

[image]

[image]

[image]

[image]

[image]

[image]

[image]

[image]

[image]

[image]

[image]

[image]

[image]

[image]

[image]

[image]

[image]

[image]

[image]

[image]

[image]

[image]

[image]

[image]

[image]

[image]

[image]

[image]

[image]

[image]

[image]

[image]

[image]

[image]

[image]

[image]

[image]

[image]

[image]

[image]

[image]

[image]

[image]

[image]

[image]

[image]

[image]

[image]

[image]

[image]

[image]

[image]

[image]

[image]

[image]

[image]

[image]

[image]

[image]

[image]

[image]

[image]

[image]

[image]

[image]

[image]

[image]

[image]

[image]

[image]

[image]

[image]

[image]

[image]

[image]

[image]

[image]

[image]

[image]

[image]

[image]

[image]

[image]

[image]

[image]

[image]

[image]

[image]

[image]

[image]

[image]

[image]

[image]

[image]

[image]

[image]

[image]

[image]

[image]

[image]

[image]

[image]

[image]

[image]

[image]

[image]

[image]

[image]

[image]

[image]

[image]

[image]

[image]

[image]

[image]

[image]

[image]

[image]

[image]

[image]

[image]

[image]

[image]

[image]

[image]

[image]

[image]

[image]

[image]

[image]

[image]

[image]

[image]

[image]

[image]

[image]

[image]

[image]

[image]

[image]

[image]

[image]

[image]

[image]

[image]

[image]

[image]

[image]

[image]

[image]

[image]

[image]

[image]

[image]

[image]

[image]

[image]

[image]

[image]

[image]

[image]

[image]

[image]

[image]

[image]

[image]

[image]

[image]

[image]

[image]

[image]

[image]

[image]

[image]

[image]

[image]

[image]

[image]

[image]

[image]

[image]

[image]

[image]

[image]

[image]

[image]

[image]

[image]

[image]

[image]

[image]

[image]

[image]

[image]

[image]

[image]

[image]

[image]

[image]

[image]

[image]

[image]

[image]

[image]

[image]

[image]

[image]

[image]

[image]

[image]

[image]

[image]

[image]

[image]

[image]

[image]

[image]

[image]

[image]

[image]

[image]

[image]

[image]

[image]

[image]

[image]

[image]

[image]

[image]

[image]

[image]

[image]

[image]

[image]

[image]

[image]

[image]

[image]

[image]

[image]

[image]

[image]

[image]

[image]

[image]

[image]

[image]

[image]

[image]

[image]

[image]

[image]

[image]

[image]

[image]

[image]

[image]

[image]

[image]

[image]

[image]

[image]

[image]

[image]

[image]

[image]

[image]

[image]

[image]

[image]

[image]

[image]

[image]

[image]

[image]

[image]

[image]

[image]

[image]

[image]

[image]

[image]

[image]

[image]

[image]

[image]

[image]

[image]

[image]

[image]

[image]

[image]

[image]

[image]

[image]

[image]

[image]

[image]

[image]

[image]

[image]

[image]

[image]

[image]

[image]

[image]

[image]

[image]

[image]

[image]

[image]

[image]

[image]

[image]

[image]

[image]

[image]

[image]

[image]

[image]

[image]

[image]

[image]

[image]

[image]

[image]

[image]

[image]

[image]

[image]

[image]

[image]

[image]

[image]

[image]

[image]

[image]

[image]

[image]

[image]

[image]

[image]

[image]

[image]

[image]

[image]

[image]

[image]

[image]

[image]

[image]

[image]

[image]

[image]

[image]

[image]

[image]

[image]

[image]

[image]

[image]

[image]

[image]

[image]

[image]

[image]

[image]

[image]

[image]

[image]

[image]

[image]

[image]

[image]

[image]

[image]

[image]

[image]

[image]

[image]

[image]

[image]

[image]

[image]

[image]

[image]

[image]

[image]

[image]

[image]

[image]

[image]

[image]

[image]

[image]

[image]

[image]

[image]

[image]

[image]

[image]

[image]

[image]

[image]

[image]

[image]

[image]

[image]

[image]

[image]

[image]

[image]

[image]

[image]

[image]

[image]

[image]

[image]

[image]

[image]

[image]

[image]

[image]

[image]

[image]

[image]

[image]

[image]

[image]

[image]

[image]

[image]

[image]

[image]

[image]

[image]

[image]

[image]

[image]

[image]

[image]

[image]

[image]

[image]

[image]

[image]

[image]

[image]

[image]

[image]

[image]

[image]

[image]

[image]

[image]

[image]

[image]

[image]

[image]

[image]

[image]

[image]

[image]

[image]

[image]

[image]

[image]

[image]

[image]

[image]

[image]

[image]

[image]

[image]

[image]

[image]

[image]

[image]

[image]

[image]

[image]

[image]

[image]

[image]

[image]

[image]

[image]

[image]

[image]

[image]

[image]

[image]

[image]

[image]

[image]

[image]

[image]

[image]

[image]

[image]

[image]

TABLE 1

| | | | | No. of | | | | |
|---|---|---|---|---|---|---|---|---|
| SEQ ID | | | | Amino | | | Homology | Functional |
| NO. | Start | Stop | Strand | Acids | Gene | Function | Group | Class |
| 0001 | 748 | 1806 | − | 352 | RCL1 | RNA 3′-terminal phosphate cyclase | COG0430 | [A] |
| 0002 | 1888 | 2403 | − | 171 | IbpA | Molecular chaperone (small heat | COG0071 | [O] |
| | | | | | | shock protein) | | |
| 0003 | 2357 | 3415 | − | 352 | | Predicted GTPase | COG1084 | [R] |
| 0004 | 3490 | 3807 | + | 105 | RPP1A | Ribosomal protein | COG2058 | [J] |
| | | | | | | L12E/L44/L45/RPP1/RPP2 | | |
| 0005 | 3811 | 5343 | − | 510 | | Replication factor C (ATPase | COG0470 | [L] |
| | | | | | | involved in DNA replication) | | |
| 0006 | 5349 | 7256 | − | 635 | | Replication factor C (ATPase | COG0470 & | [L][L] |
| | | | | | | involved in DNA replication) intein | COG1372 | |
| | | | | | | containing | | |
| 0007 | 7315 | 8682 | − | 455 | TIP49 | DNA helicase TIP49, TBP-interacting | COG1224 | [K] |
| | | | | | | protein | | |
| 0008 | 8796 | 9161 | + | 121 | DsrE | Uncharacterized conserved protein | COG1553 | [P] |
| | | | | | | involved in intracellular sulfur | | |
| | | | | | | reduction | | |
| 0009 | 9299 | 10450 | + | 383 | | Uncharacterized protein specific for | | |
| | | | | | | M. kandleri, MK-36 family | | |
| 0010 | 10400 | 11074 | − | 224 | | Predicted dinucleotide-utilizing | COG4015 | [R] |
| | | | | | | enzyme of the ThiF/HesA family | | |
| 0011 | 11167 | 12018 | + | 283 | Mtd | F420 dependent N5,N10- | COG1927 | [C] |
| | | | | | | methylenetetrahydromethanopterin | | |
| | | | | | | dehydrogenase | | |
| 0012 | 11999 | 12547 | − | 182 | | Uncharacterized protein conserved | COG4016 | [S] |
| | | | | | | in archaea | | |
| 0013 | 12672 | 13748 | + | 358 | Hmd | H2-forming N5,N10- | COG4074 | [C] |
| | | | | | | methylenetetrahydromethanopterin | | |
| | | | | | | dehydrogenase | | |
| 0014 | 13791 | 14549 | + | 252 | | Uncharacterized protein conserved | COG4017 | [S] |
| | | | | | | in archaea | | |
| 0015 | 14518 | 15279 | + | 253 | | Uncharacterized conserved protein | COG0327 | [S] |
| 0016 | 15236 | 16306 | + | 356 | | Biotin synthase and related enzymes | COG0502 | [H] |
| 0017 | 16252 | 17787 | + | 511 | | Uncharacterized protein conserved | COG4018 | [S] |
| | | | | | | in archaea, FLPA ortholog | | |
| 0018 | 17781 | 18263 | + | 160 | | Uncharacterized protein conserved | COG4019 | [S] |
| | | | | | | in archaea | | |
| 0019 | 18347 | 19369 | + | 340 | | Collagenase and related proteases | COG0826 | [O] |
| 0020 | 19326 | 19685 | + | 119 | | Predicted metal-binding protein | | |
| 0021 | 20108 | 20878 | − | 256 | Pnp | 5′-methylthioadenosine | COG0005 | [F] |
| | | | | | | phosphorylase | | |
| 0022 | 20875 | 21456 | − | 193 | Cmk | Cytidylate kinase | COG1102 | [F] |
| 0023 | 21460 | 21801 | − | 113 | RPL34A | Ribosomal protein L34E | COG2174 | [J] |
| 0024 | 21809 | 22345 | − | 178 | | Predicted membrane protein | COG1422 | [S] |
| 0025 | 22359 | 22934 | − | 191 | AdkA | Archaeal adenylate kinase | COG2019 | [F] |
| 0026 | 22954 | 24330 | − | 458 | SecY | Preprotein translocase subunit SecY | COG0201 | [U] |
| 0027 | 24397 | 24861 | − | 154 | RplO | Ribosomal protein L15 | COG0200 | [J] |
| 0028 | 24876 | 25325 | − | 149 | RpmD | Ribosomal protein L30/L7E | COG1841 | [J] |
| 0029 | 25473 | 26153 | − | 226 | RpsE | Ribosomal protein S5 | COG0098 | [J] |
| 0030 | 26170 | 26778 | − | 202 | RplR | Ribosomal protein L18 | COG0256 | [J] |
| 0031 | 26782 | 27231 | − | 149 | RPL19A | Ribosomal protein L19E | COG2147 | [J] |
| 0032 | 27295 | 27900 | − | 201 | | C4-type Zn finger | COG1779 | [R] |
| 0033 | 27917 | 28900 | − | 327 | | 2-phosphoglycerate kinase & | COG2074 & | [G] |
| | | | | | | Predicted small molecule binding | COG1827 | [R] |
| | | | | | | protein (contains 3H domain) | | |
| 0034 | 28904 | 29251 | − | 115 | | Uncharacterized conserved protein | COG2450 | [S] |
| 0035 | 29245 | 30336 | − | 363 | | Uncharacterized conserved protein | COG3367 | [S] |
| 0036 | 30390 | 30980 | − | 196 | | GTPase SAR1 and related small G | COG1100 | [R] |
| | | | | | | proteins | | |
| 0037 | 31183 | 31749 | + | 188 | | Predicted hydrolase of HD | COG1896 | [R] |
| | | | | | | superfamily | | |
| 0038 | 31721 | 32782 | + | 353 | PelA | Predicted RNA-binding protein | COG1537 | [R] |
| | | | | | | pelota | | |
| 0039 | 33253 | 34011 | − | 252 | | RecA-superfamily ATPase | COG0467 | [T] |
| | | | | | | implicated in signal transduction | | |
| 0040 | 34081 | 35229 | + | 382 | | Uncharacterized conserved protein | COG1602 | [S] |
| 0041 | 35263 | 37083 | + | 606 | | Uncharacterized conserved protein | COG1542 | [S] |
| 0042 | 37451 | 38404 | − | 317 | | Uncharacterized protein | | |
| 0043 | 38495 | 39829 | − | 444 | | tRNA and rRNA cytosine-C5- | COG0144 | [J] |
| | | | | | | methylases | | |
| 0044 | 40642 | 41649 | − | 335 | | Fe—S oxidoreductase similar to | COG1242 | [R] |
| | | | | | | Oxygen-independent | | |
| | | | | | | coproporphyrinogen III oxidase (like | | |
| | | | | | | hemN) | | |
| 0045 | 41815 | 42918 | + | 367 | | Predicted GTPase of the YlqF family | COG1161 | [R] |
| 0046 | 43093 | 43638 | + | 181 | | SAM-dependent methyltransferase | COG0500 | [QR] |
| 0047 | 43671 | 44753 | − | 360 | | Pyruvate-formate lyase-activating | COG1180 | [O] |
| | | | | | | enzyme | | |
| 0048 | 44786 | 45367 | + | 193 | | Uncharacterized conserved protein | COG1590 | [S] |
| 0049 | 45367 | 49032 | + | 1221 | RgyB | Reverse gyrase, subunit B | COG1110 | [L] |
| 0050 | 49029 | 49949 | + | 306 | | Uncharacterized protein | | |
| 0051 | 49918 | 50835 | − | 305 | | Predicted ATPase of the PP-loop | COG0037 | [D] |
| | | | | | | superfamily implicated in cell cycle | | |
| | | | | | | control | | |
| 0052 | 50862 | 51494 | + | 210 | GlpG | Predicted membrane serine protease | COG0705 | [R] |
| | | | | | | of the Rhomboid superfamily | | |
| 0053 | 51991 | 53284 | + | 431 | AmtB | Ammonia permease | COG0004 | [P] |
| 0054 | 53306 | 53659 | + | 117 | | Nitrogen regulatory protein PII | COG0347 | [E] |
| 0055 | 53735 | 54652 | − | 305 | | Fe—S oxidoreductase | COG0731 | [C] |
| 0056 | 55284 | 55847 | − | 187 | | Uncharacterized protein conserved | COG1772 | [S] |
| | | | | | | in archaea | | |
| 0057 | 55840 | 56433 | − | 197 | | Uncharacterized conserved protein | COG1628 | [S] |
| 0058 | 56430 | 56768 | − | 112 | RPB11 | DNA-directed RNA polymerase, | COG1761 | [K] |
| | | | | | | subunit L | | |
| 0059 | 56784 | 57464 | − | 226 | | Uncharacterized protein conserved | COG3286 | [S] |
| | | | | | | in archaea | | |
| 0060 | 57457 | 58047 | − | 196 | | Predicted RNA-binding protein | COG1096 | [J] |
| | | | | | | (consists of S1 domain and a Zn- | | |
| | | | | | | ribbon domain) | | |
| 0061 | 58044 | 59066 | − | 340 | RecJ | Single-stranded DNA-specific | COG0608 | [L] |
| | | | | | | exonuclease | | |
| 0062 | 59083 | 59697 | − | 204 | | Predicted RNA methylase | COG2263 | [J] |
| 0063 | 59694 | 59882 | − | 62 | | Zn-ribbon containing protein | | |
| 0064 | 59908 | 60720 | + | 270 | | Uncharacterized protein | | |
| 0065 | 60717 | 61094 | − | 125 | | Uncharacterized conserved protein | COG4744 | [S] |
| 0066 | 61097 | 61705 | − | 202 | TolQ | Biopolymer transport proteins | COG0811 | [U] |
| 0067 | 61681 | 62895 | − | 404 | | Predicted transporter | COG4827 | [R] |
| 0068 | 62910 | 63524 | − | 204 | | Uncharacterized protein | | |
| 0069 | 63592 | 63867 | − | 91 | | Uncharacterized protein | | |
| 0070 | 63864 | 65960 | − | 698 | | Superfamily I DNA/RNA helicase | COG1112 | [L] |
| 0071 | 66184 | 66945 | + | 253 | | ATP-utilizing enzymes of the PP- | COG1606 | [R] |
| | | | | | | loop superfamily | | |
| 0072 | 66957 | 68126 | − | 389 | | Uncharacterized protein specific for | | |
| | | | | | | M. kandleri, MK-21 family | | |
| 0073 | 68133 | 69011 | − | 292 | NadA | Quinolinate synthase | COG0379 | [H] |
| 0074 | 69027 | 69896 | − | 289 | | Predicted metal-dependent | COG1831 | [R] |
| | | | | | | hydrolase of the urease superfamily | | |
| 0075 | 69998 | 70933 | + | 311 | | Uncharacterized protein | | |
| 0076 | 70930 | 71757 | + | 275 | | Uncharacterized domain specific for | | |
| | | | | | | M. kandleri, MK-33 family | | |
| 0077 | 71931 | 73088 | + | 385 | | Predicted GTPase or GTP-binding | COG1341 | [R] |
| | | | | | | protein | | |
| 0078 | 73121 | 74119 | + | 332 | | Predicted carbohydrate kinase of the | COG4020 | [S] |
| | | | | | | FGGY family | | |
| 0079 | 74116 | 74928 | + | 270 | TyrA_1 | Prephenate dehydratase | COG0077 | [E] |
| 0080 | 74941 | 75492 | + | 183 | PorG_1 | Pyruvate: ferredoxin oxidoreductase, | COG1014 | [C] |
| | | | | | | gamma subunit | | |
| 0081 | 75485 | 75754 | + | 89 | PorD | Pyruvate: ferredoxin oxidoreductase, | COG1144 | [C] |
| | | | | | | delta subunit | | |
| 0082 | 75767 | 76918 | + | 383 | PorA_1 | Pyruvate: ferredoxin oxidoreductase, | COG0674 | [C] |
| | | | | | | alpha subunit | | |
| 0083 | 76931 | 77821 | + | 296 | PorB_1 | Pyruvate: ferredoxin oxidoreductase, | COG1013 | [C] |
| | | | | | | beta subunit | | |
| 0084 | 77794 | 78321 | + | 175 | | Fe—S-cluster-containing hydrogenase | COG1142 | [C] |
| | | | | | | component | | |
| 0085 | 78242 | 79153 | + | 303 | TtdA | Tartrate dehydratase alpha | COG1951 | [C] |
| | | | | | | subunit/Fumarate hydratase class I, | | |
| | | | | | | N-terminal domain | | |
| 0086 | 79158 | 79691 | + | 177 | FumA | Tartrate dehydratase beta | COG1838 | [C] |
| | | | | | | subunit/Fumarate hydratase class I, | | |
| | | | | | | C-terminal domain | | |
| 0087 | 79695 | 80291 | + | 198 | purO | Archaeal IMP cyclohydrolase | COG3363 | [F] |
| 0088 | 80293 | 82308 | − | 671 | | Predicted RNA-binding protein | COG1293 | [K] |
| | | | | | | homologous to eukaryotic snRNP | | |
| 0089 | 82341 | 83522 | − | 393 | | FOG: CBS domain | COG0517 | [R] |
| 0090 | 83620 | 83895 | + | 91 | | Uncharacterized membrane protein, | | |
| | | | | | | conserved in archaea | | |
| 0091 | 83902 | 85701 | + | 599 | | Predicted ATPase, RNase L inhibitor | COG1245 | [R] |
| | | | | | | (RLI) homolog | | |
| 0092 | 86099 | 86650 | − | 183 | | Predicted phosphoesterase | COG0622 | [R] |
| 0093 | 86682 | 87470 | − | 262 | | Uncharacterized conserved protein | COG4021 | [S] |
| 0094 | 87467 | 88255 | − | 262 | | Predicted dinucleotide-utilizing | COG1712 | [R] |
| | | | | | | enzyme | | |
| 0095 | 88185 | 88820 | − | 211 | | Uncharacterized conserved protein | COG2428 | [S] |
| 0096 | 88832 | 89203 | − | 123 | | Uncharacterized conserved protein | COG1873 | [S] |
| 0097 | 89216 | 90763 | + | 515 | | Predicted carbamoyl transferase, | COG2192 | [O] |
| | | | | | | NodU family | | |
| 0098 | 90768 | 91475 | + | 235 | RibD | 2,5-diamino-6-ribosylamino-4(3H)- | COG1985 | [H] |
| | | | | | | pyrimidinone 5′-phosphate | | |
| | | | | | | reductase, riboflavin biosynthesis | | |
| 0099 | 91472 | 91828 | + | 118 | | Zn-ribbon-containing protein | | |
| 0100 | 91983 | 93164 | + | 393 | | Uncharacterized protein specific for | | |
| | | | | | | M. kandleri, MK-36 family | | |
| 0101 | 93378 | 93962 | + | 194 | Tmk | Thymidylate kinase | COG0125 | [F] |
| 0102 | 93969 | 94385 | + | 138 | | Holliday junction resolvase, archaeal | COG1591 | [L] |
| | | | | | | type | | |
| 0103 | 94354 | 95916 | − | 520 | AsnB | Asparagine synthase (glutamine- | COG0367 | [E] |
| | | | | | | hydrolyzing) | | |
| 0104 | 95989 | 98838 | + | 949 | | Uncharacterized protein specific for | | |
| | | | | | | M. kandleri, MK-40 family | | |
| 0105 | 98775 | 99845 | − | 356 | | Diverged homolog of ATP- | | |
| | | | | | | dependent DNA ligase (eukaryotic | | |
| | | | | | | ligase III) | | |
| 0106 | 99868 | 101157 | − | 429 | ThiC | Thiamine biosynthesis protein ThiC | COG0422 | [H] |
| 0107 | 101154 | 102512 | − | 452 | | Predicted diverged member of | | |
| | | | | | | adenylate cyclase 3 family | | |
| 0108 | 102514 | 103230 | − | 238 | | Uncharacterized protein conserved | | |
| | | | | | | in archaea | | |
| 0109 | 103269 | 104672 | + | 467 | LysC | Aspartokinase | COG0527 | [E] |
| 0110 | 104669 | 105400 | + | 243 | | Uncharacterized protein | | |
| 0111 | 105387 | 107522 | − | 711 | | Superfamily II helicase | COG1204 | [R] |
| 0112 | 107561 | 108058 | + | 165 | PaaY | Carbonic | COG0663 | [R] |
| | | | | | | anhydrases/acetyltransferases, | | |
| | | | | | | isoleucine patch superfamily | | |
| 0113 | 108066 | 109103 | − | 345 | | Predicted sugar kinase of the | COG1548 | [KG] |
| | | | | | | RNAseH/HSP70 fold | | |
| 0114 | 109078 | 110001 | − | 307 | | Predicted ATP-utilizing enzymes of | COG1821 | [R] |
| | | | | | | the ATP-grasp superfamily | | |
| 0115 | 110027 | 111160 | + | 377 | | Uncharacterized conserved protein | COG1944 | [S] |
| 0116 | 111223 | 112113 | − | 296 | Ftr_1 | Formylmethanofuran:tetrahydromethanopterin | COG2037 | [C] |
| | | | | | | formyltransferase | | |
| 0117 | 112165 | 113037 | − | 290 | AroE | Shikimate 5-dehydrogenase | COG0169 | [E] |
| 0118 | 113009 | 113827 | − | 272 | | Calcineurin superfamily phosphatase | COG0622 | [R] |
| | | | | | | (nuclease) with Zn-cluster | | |
| 0119 | 113841 | 114335 | − | 164 | UbiC | 4-hydroxybenzoate synthetase | COG3161 | [H] |
| | | | | | | (chorismate lyase) | | |
| 0120 | 114352 | 115302 | − | 316 | | Uncharacterized archaeal coiled-coil | COG1340 | [S] |
| | | | | | | protein | | |
| 0121 | 115299 | 115952 | − | 217 | SerB | Phosphoserine phosphatase | COG0560 | [E] |
| 0122 | 115928 | 117214 | − | 428 | GlyA | Glycine/serine | COG0112 | [E] |
| | | | | | | hydroxymethyltransferase | | |
| 0123 | 117235 | 117816 | + | 193 | | Uncharacterized protein | | |
| 0124 | 117823 | 118356 | + | 177 | | Ferredoxin domain containing | COG4739 | [S] |
| | | | | | | protein | | |
| 0125 | 118374 | 118637 | + | 87 | | Zn-ribbon containing protein | | |
| 0126 | 118826 | 120259 | + | 477 | | Kef-type K+ transport systems (NAD- | COG1226 & | [P][R] |
| | | | | | | binding component fused to domain | COG0618 | |
| | | | | | | related to exopolyphosphatase) | | |
| 0127 | 120262 | 122115 | − | 617 | GlmS | glucosamine-fructose-6-phosphate | COG0449 | [M] |
| | | | | | | aminotransferase | | |
| 0128 | 122121 | 123176 | − | 351 | | Acetylornithine | COG0624 | [E] |
| | | | | | | deacetylase/Succinyl- | | |
| | | | | | | diaminopimelate desuccinylase and | | |
| | | | | | | related deacylases | | |
| 0129 | 123173 | 125095 | − | 640 | GatE | Archaeal Glu-tRNAGln | COG2511 | [J] |
| | | | | | | amidotransferase subunit E | | |
| | | | | | | (contains GAD domain) | | |
| 0130 | 125187 | 125582 | + | 131 | Ada | Methylated DNA-protein cysteine | COG0350 | [L] |
| | | | | | | methyltransferase | | |
| 0131 | 125594 | 126139 | + | 181 | | Uncharacterized conserved protein | COG2029 | [S] |
| 0132 | 126133 | 127611 | + | 492 | FrdB/ | Succinate dehydrogenase/fumarate | COG0479 & | [C][C] |
| | | | | | GlpC | reductase Fe—S protein | COG0247 | |
| 0133 | 127591 | 128607 | − | 338 | TruB | Pseudouridine synthase of the TruB | COG0130 | [J] |
| | | | | | | family | | |
| 0134 | 128665 | 134793 | − | 2042 | | Cobalamin biosynthesis protein | COG1429 | [H] |
| | | | | | | CobN and related Mg-chelatases | | |
| 0135 | 134868 | 136871 | − | 667 | | Terpene cyclase/mutase family | | |
| | | | | | | protein | | |
| 0136 | 137011 | 137391 | − | 126 | | Predicted transcriptional regulator | COG0640 | [K] |
| 0137 | 137551 | 138318 | − | 255 | | Uncharacterized conserved protein | COG2106 | [S] |
| 0138 | 138349 | 139011 | + | 220 | ComB | 2-phosphosulfolactate phosphatase | COG2045 | [HR] |
| 0139 | 139012 | 139761 | + | 249 | | Uncharacterized conserved protein, | COG1916 | [S] |
| | | | | | | PrgY homolog (pheromone | | |
| | | | | | | shutdown protein) | | |
| 0140 | 139843 | 140517 | + | 224 | | Uncharacterized protein conserved | COG1810 | [S] |
| | | | | | | in archaea | | |
| 0141 | 140548 | 141339 | − | 263 | | Predicted permease | COG0730 | [R] |
| 0142 | 141415 | 141891 | + | 158 | | Universal stress protein UspA and | COG0589 | [T] |
| | | | | | | related nucleotide-binding proteins | | |
| 0143 | 141888 | 142646 | − | 252 | | Predicted permease | COG0730 | [R] |
| 0144 | 142704 | 143494 | − | 263 | | Predicted ATPase of the PP-loop | COG0037 | [D] |
| | | | | | | superfamily implicated in cell cycle | | |
| | | | | | | control | | |
| 0145 | 143437 | 143949 | + | 170 | | Uncharacterized conserved protein | COG2410 | [S] |
| 0146 | 143918 | 146485 | − | 855 | | Predicted P-loop ATPase fused to an | COG1444 | [R] |
| | | | | | | acetyltransferase | | |
| 0147 | 146611 | 147321 | + | 236 | | Uncharacterized protein conserved | | |
| | | | | | | in archaea | | |
| 0148 | 147400 | 148779 | − | 459 | | Selenocysteine-specific translation | COG3276 | [J] |
| | | | | | | elongation factor | | |
| 0149 | 148789 | 149439 | − | 216 | | Uncharacterized membrane protein | | |
| 0150 | 149446 | 150267 | − | 273 | | Uncharacterized protein conserved | COG4022 | [S] |
| | | | | | | in archaea | | |
| 0151 | 150225 | 150746 | + | 173 | | Uncharacterized conserved protein | COG1720 | [S] |
| 0152 | 150700 | 152415 | − | 571 | GRS1 | Glycyl-tRNA synthetase, class II | COG0423 | [J] |
| 0153 | 152432 | 153412 | − | 326 | SgbH | 3-hexulose-6-phosphate synthase | COG0269 | [G] |
| 0154 | 153397 | 154548 | − | 383 | TRM1_1 | N2,N2-dimethylguanosine tRNA | COG1867 | [J] |
| | | | | | | methyltransferase | | |
| 0155 | 154583 | 154855 | − | 90 | | Ribosomal protein L35AE/L33A | COG2451 | [J] |
| 0156 | 154883 | 156067 | + | 394 | | Predicted pyridoxal-phosphate- | COG0399 | [M] |
| | | | | | | dependent enzyme apparently | | |
| | | | | | | involved in regulation of cell wall | | |
| | | | | | | biogenesis | | |
| 0157 | 156089 | 158347 | + | 752 | | Archaea-specific RecJ-like | COG1107 | [L] |
| | | | | | | exonuclease, contains DnaJ-type Zn | | |
| | | | | | | finger domain | | |
| 0158 | 158344 | 158832 | − | 162 | SrtA | Sortase (surface protein | COG3764 | [M] |
| | | | | | | transpeptidase) | | |
| 0159 | 158829 | 159656 | − | 275 | | Predicted membrane protein | | |
| 0160 | 159680 | 160726 | − | 348 | | Uncharacterized protein conserved | COG1627 | [S] |
| | | | | | | in archaea | | |
| 0161 | 160771 | 161502 | − | 243 | PssA | Phosphatidylserine synthase | COG1183 | [I] |
| 0162 | 161509 | 162153 | − | 214 | Psd | Phosphatidylserine decarboxylase | COG0688 | [I] |
| 0163 | 162159 | 162707 | − | 182 | | SAM-dependent methyltransferase | COG0500 | [QR] |
| 0164 | 162731 | 163357 | + | 208 | | GTPase SAR1 and related small G | COG1100 | [R] |
| | | | | | | proteins | | |
| 0165 | 163354 | 163716 | + | 120 | | Uncharacterized protein conserved | COG3365 | [S] |
| | | | | | | in archaea | | |
| 0166 | 163730 | 163984 | + | 84 | | Zn-ribbon containing protein | COG3364 | [R] |
| 0167 | 163989 | 164609 | + | 206 | | Uncharacterized protein conserved | | |
| | | | | | | in archaea | | |
| 0168 | 164625 | 165806 | + | 393 | MreB | Actin-like ATPase involved in cell | COG1077 | [D] |
| | | | | | | morphogenesis | | |
| 0169 | 165843 | 166553 | + | 236 | | Histidinol phosphatase and related | COG1387 | [ER] |
| | | | | | | hydrolases of the PHP family | | |
| 0170 | 166637 | 167686 | + | 349 | | tRNA and rRNA cytosine-C5- | COG0144 | [J] |
| | | | | | | methylases | | |
| 0171 | 167695 | 168651 | + | 318 | HtpX | Zn-dependent protease with | COG0501 | [O] |
| | | | | | | chaperone function | | |
| 0172 | 168617 | 169261 | − | 214 | | Predicted metal-dependent | | |
| | | | | | | hydrolase | | |
| 0173 | 169255 | 170073 | − | 272 | HisF | Imidazoleglycerol-phosphate | COG0107 | [E] |
| | | | | | | synthase | | |
| 0174 | 170173 | 170856 | + | 227 | | Uncharacterized conserved protein | COG2454 | [S] |
| 0175 | 170934 | 171410 | + | 158 | TroR | Mn-dependent transcriptional | COG1321 | [K] |
| | | | | | | regulator | | |
| 0176 | 171517 | 171996 | + | 159 | | Uncharacterized protein | | |
| 0177 | 172421 | 172690 | + | 89 | | Predicted membrane protein | | |
| 0178 | 172865 | 174169 | − | 434 | | Coenzyme F420-reducing | COG3259 | [C] |
| | | | | | | hydrogenase, alpha subunit | | |
| 0179 | 174173 | 175090 | − | 305 | | Coenzyme F420-reducing | COG1941 | [C] |
| | | | | | | hydrogenase, gamma subunit | | |
| 0180 | 175215 | 175787 | + | 190 | CbiM | Cobalamin biosynthesis protein | COG0310 | [P] |
| | | | | | | CbiM | | |
| 0181 | 175784 | 176476 | + | 230 | CbiQ | ABC-type cobalt transport system, | COG0619 | [P] |
| | | | | | | permease component | | |
| 0182 | 176505 | 177311 | + | 268 | CbiO | ABC-type cobalt transport system, | COG1122 | [P] |
| | | | | | | ATPase component | | |
| 0183 | 177298 | 177972 | + | 224 | | Protein similar to creatinine | COG1402 | [R] |
| | | | | | | amidohydrolase | | |
| 0184 | 177969 | 178136 | + | 55 | | Uncharacterized protein | | |
| 0185 | 178176 | 178400 | + | 74 | | Uncharacterized protein | | |
| 0186 | 178822 | 179454 | + | 210 | RnhB | Ribonuclease HII | COG0164 | [L] |
| 0187 | 179476 | 180135 | + | 219 | | Pyruvate-formate lyase-activating | COG1180 | [O] |
| | | | | | | enzyme | | |
| 0188 | 180142 | 181521 | + | 459 | Tgt | Queuine/archaeosine tRNA- | COG0343 | [J] |
| | | | | | | ribosyltransferase | | |
| 0189 | 181481 | 182362 | + | 293 | TRM1_2 | N2,N2-dimethylguanosine tRNA | COG1867 | [J] |
| | | | | | | methyltransferase | | |
| 0190 | 182418 | 184016 | + | 532 | | Uncharacterized protein conserved | COG1892 | [S] |
| | | | | | | in archaea | | |
| 0191 | 184291 | 185067 | − | 258 | | Uncharacterized protein | | |
| 0192 | 185064 | 187520 | − | 818 | Chll/ChlD | Mg-chelatase subunit ChlI and Chld | COG1239 & | [H][H] |
| | | | | | | (MoxR-like ATPase and vWF | COG1240 | |
| | | | | | | domain) similar to subunits of a Ni- | | |
| | | | | | | chelatase for the biosynthesis of the | | |
| | | | | | | Ni-containing coenzyme F430, which | | |
| | | | | | | is essential for the production of | | |
| | | | | | | methane in methanogens | | |
| 0193 | 187517 | 188218 | − | 233 | Nth_1 | Predicted EndoIII-related | COG0177 | [L] |
| | | | | | | endonuclease | | |
| 0194 | 188360 | 189619 | − | 419 | | HD superfamily phosphohydrolase | COG1078 | [R] |
| 0195 | 189564 | 190313 | − | 249 | | Uncharacterized conserved protein | COG2457 | [S] |
| 0196 | 190289 | 191185 | − | 298 | CitG_1 | Triphosphoribosyl-dephospho-CoA | COG1767 | [H] |
| | | | | | | synthetase | | |
| 0197 | 191179 | 191640 | − | 153 | PgpB | Membrane-associated phospholipid | COG0671 | [I] |
| | | | | | | phosphatase | | |
| 0198 | 191625 | 192632 | − | 335 | HemB | Delta-aminolevulinic acid | COG0113 | [H] |
| | | | | | | dehydratase | | |
| 0199 | 192583 | 193491 | + | 302 | | Uncharacterized protein | | |
| 0200 | 193462 | 194676 | − | 404 | HemA | Glutamyl-tRNA reductase | COG0373 | [H] |
| 0201 | 194763 | 195011 | + | 82 | | Uncharacterized protein | | |
| 0202 | 195008 | 195703 | − | 231 | Mra1 | Uncharacterized conserved protein | COG1756 | [S] |
| 0203 | 195719 | 196417 | + | 232 | | Predicted hydrolase of the HAD | COG0561 | [R] |
| | | | | | | superfamily | | |
| 0204 | 196414 | 197445 | + | 343 | RecJ_1 | Single-stranded DNA-specific | COG0608 | [L] |
| | | | | | | exonuclease | | |
| 0205 | 197414 | 199021 | − | 535 | PyrG | CTP synthase (UTP-ammonia lyase) | COG0504 | [F] |
| 0206 | 199348 | 200073 | + | 241 | | Uncharacterized protein conserved | COG2122 | [S] |
| | | | | | | in archaea | | |
| 0207 | 200076 | 200687 | − | 203 | | Predicted GTPase of the YihA family | COG0218 | [R] |
| 0208 | 200743 | 200916 | − | 57 | | Preprotein translocase subunit | COG4023 | [U] |
| | | | | | | Sec61beta | | |
| 0209 | 201121 | 201396 | + | 91 | | Uncharacterized protein | | |
| 0210 | 201559 | 202800 | − | 413 | | Diverged homolog of ATP- | | |
| | | | | | | dependent DNA ligase (eukaryotic | | |
| | | | | | | ligase III) | | |
| 0211 | 202797 | 203468 | − | 223 | | Uncharacterized protein conserved | COG4024 | [S] |
| | | | | | | in archaea | | |
| 0212 | 203539 | 204414 | − | 291 | | Uncharacterized membrane protein, | COG4025 | [S] |
| | | | | | | conserved in archaea | | |
| 0213 | 204416 | 205297 | − | 293 | | Predicted hydrolase of the metallo- | COG2248 | [R] |
| | | | | | | beta-lactamase superfamily | | |
| 0214 | 205420 | 205839 | − | 139 | | Predicted metal-dependent protease | COG1310 | [R] |
| | | | | | | of the PAD1/JAB1 superfamily | | |
| 0215 | 205772 | 206662 | − | 296 | | Predicted membrane protein | | |
| 0216 | 206731 | 207078 | + | 115 | | Predicted regulator of Ras-like | COG2018 | [R] |
| | | | | | | GTPase activity, member of the | | |
| | | | | | | Roadblock/LC7/MgIB family | | |
| 0217 | 207252 | 207995 | + | 247 | | Uncharacterized protein | | |
| 0218 | 207997 | 208806 | + | 269 | | ATPase involved in chromosome | COG0455 | [D] |
| | | | | | | partitioning | | |
| 0219 | 208803 | 209303 | − | 166 | | Predicted RNA-binding protein | COG2016 | [J] |
| | | | | | | containing PUA domain | | |
| 0220 | 209340 | 209561 | + | 73 | LSM1 | Small nuclear ribonucleoprotein | COG1958 | [K] |
| | | | | | | (snRNP) homolog | | |
| 0221 | 209582 | 209770 | + | 62 | RPL37A | Ribosomal protein L37E | COG2126 | [J] |
| 0222 | 209784 | 210659 | + | 291 | | TOPRIM-domain-containing protein, | COG4026 | [R] |
| | | | | | | potential nuclease | | |
| 0223 | 210649 | 211632 | + | 327 | PepP | Xaa-Pro aminopeptidase | COG0006 | [E] |
| 0224 | 211590 | 212726 | + | 378 | CobT | NaMN:DMB | COG2038 | [H] |
| | | | | | | phosphoribosyltransferase | | |
| 0225 | 212723 | 213457 | − | 244 | | Uncharacterized membrane protein | | |
| | | | | | | specific for M. kandleri, MK-4 family | | |
| 0226 | 213461 | 214513 | − | 350 | HypD | Hydrogenase maturation factor | COG0409 | [O] |
| 0227 | 214461 | 214739 | − | 92 | HypC | Hydrogenase maturation factor | COG0298 | [O] |
| 0228 | 214814 | 215236 | + | 140 | | Uncharacterized conserved protein | COG1371 | [S] |
| 0229 | 215254 | 216432 | + | 392 | | Archaea-specific pyridoxal | COG1103 | [R] |
| | | | | | | phosphate-dependent enzyme | | |
| 0230 | 216609 | 217232 | + | 207 | | Predicted RNA methylase | | |
| 0231 | 217222 | 217764 | − | 180 | | Predicted transcriptional regulator | COG1318 | [K] |
| 0232 | 217843 | 218598 | + | 251 | | Predicted metal-dependent | COG1099 | [R] |
| | | | | | | hydrolase of the TIM-barrel fold | | |
| 0233 | 218648 | 219319 | + | 223 | | Predicted dinucleotide-binding | COG2085 | [R] |
| | | | | | | enzyme | | |
| 0234 | 219392 | 220681 | + | 429 | UbiD | Predicted decarboxylase related 3- | COG0043 | [H] |
| | | | | | | polyprenyl-4-hydroxybenzoate | | |
| | | | | | | decarboxylase | | |
| 0235 | 220673 | 221713 | − | 346 | PurA | Adenylosuccinate synthase | COG0104 | [F] |
| 0236 | 221605 | 223494 | − | 629 | | Uncharacterized protein | | |
| 0237 | 223440 | 225296 | − | 618 | | Uncharacterized secreted protein | | |
| 0238 | 225321 | 226688 | + | 455 | GatA | Asp-tRNAAsn/Glu-tRNAGln | COG0154 | [J] |
| | | | | | | amidotransferase A subunit | | |
| 0239 | 227527 | 227967 | + | 146 | | Predicted SAM-dependent | COG0500 | [QR] |
| | | | | | | methyltransferase | | |
| 0240 | 228106 | 228978 | − | 290 | | ATPase involved in chromosome | COG0489 | [D] |
| | | | | | | partitioning | | |
| 0241 | 229171 | 230037 | − | 288 | | Uncharacterized membrane protein, | | |
| | | | | | | conserved in archaea | | |
| 0242 | 230076 | 231260 | + | 394 | | Predicted membrane protein | | |
| 0243 | 231242 | 232369 | − | 375 | | Fe—S oxidoreductase, related to | COG1625 | [C] |
| | | | | | | NifB/MoaA family | | |
| 0244 | 232648 | 234678 | − | 676 | | Distinct Superfamily II helicase | COG1205 | [R] |
| | | | | | | family with a unique C-terminal | | |
| | | | | | | domain including a metal-binding | | |
| | | | | | | cysteine cluster | | |
| 0245 | 234728 | 235990 | + | 420 | CysH | 3′-phosphoadenosine 5′- | COG4027 & | [S][EH] |
| | | | | | | phosphosulfate sulfotransferase | COG0175 | |
| | | | | | | (PAPS reductase)/FAD synthetase | | |
| | | | | | | fused to uncharacterized archaeal | | |
| | | | | | | protein | | |
| 0246 | 236115 | 236423 | − | 102 | RpsJ | Ribosomal protein S10 | COG0051 | [J] |
| 0247 | 236467 | 237738 | − | 423 | | Translation elongation factor EF- | COG5256 | [J] |
| | | | | | | 1alpha (GTPase) | | |
| 0248 | 237821 | 238774 | − | 317 | | Predicted dehydrogenase | COG0673 | [R] |
| 0249 | 238965 | 240974 | − | 669 | HdrA_1 | Heterodisulfide reductase, subunit A | COG1148 | [C] |
| 0250 | 241089 | 241838 | − | 249 | | Uncharacterized protein | | |
| 0251 | 241914 | 242435 | + | 173 | RplP | Ribosomal protein L16/L10E | COG0197 | [J] |
| 0252 | 242469 | 244781 | + | 770 | PpsA | Phosphoenolpyruvate | COG0574 | [G] |
| | | | | | | synthase/pyruvate phosphate | | |
| | | | | | | dikinase | | |
| 0253 | 244787 | 245512 | + | 241 | | Predicted transcriptional regulator | COG1378 | [K] |
| 0254 | 245475 | 245990 | − | 171 | | Predicted HD superfamily hydrolase | COG1418 | [R] |
| 0255 | 246012 | 246296 | − | 94 | EFB1 | Translation elongation factor EF- | COG2092 | [J] |
| | | | | | | 1beta | | |
| 0256 | 246301 | 246495 | − | 64 | | Predicted Zn-ribbon-containing RNA- | COG2888 | [J] |
| | | | | | | binding protein with a function in | | |
| | | | | | | translation | | |
| 0257 | 246666 | 246899 | − | 77 | | Predicted redox protein, regulator of | COG0425 | [O] |
| | | | | | | disulfide bond formation | | |
| 0258 | 247069 | 248334 | + | 421 | HgdB | Benzoyl-CoA reductase/2- | COG1775 | [E] |
| | | | | | | hydroxyglutaryl-CoA dehydratase | | |
| | | | | | | subunit, BcrC/BadD/HgdB | | |
| 0259 | 248342 | 249646 | − | 434 | FwdB_1 | Formylmethanofuran dehydrogenase | COG1029 | [C] |
| | | | | | | subunit B | | |
| 0260 | 249749 | 250504 | − | 251 | | Activator of 2-hydroxyglutaryl-CoA | COG1924 | [I] |
| | | | | | | dehydratase, contains a HSP70- | | |
| | | | | | | class ATPase domain | | |
| 0261 | 250695 | 251156 | + | 153 | | Uncharacterized membrane protein, | | |
| | | | | | | conserved in archaea | | |
| 0262 | 251171 | 251644 | + | 157 | | Predicted transporter component | COG2391 | [R] |
| 0263 | 251649 | 252227 | + | 192 | | Uncharacterized protein conserved | | |
| | | | | | | in archaea | | |
| 0264 | 252347 | 253048 | + | 233 | | Predicted sugar kinase | COG0063 | [G] |
| 0265 | 253054 | 255024 | − | 656 | HdrA_2 | Heterodisulfide reductase, subunit A, | COG1148 | [C] |
| | | | | | | polyferredoxin | | |
| 0266 | 255031 | 256479 | − | 482 | | Coenzyme F420-reducing | COG3259 | [C] |
| | | | | | | hdrogenase, alpha subunit | | |
| 0267 | 256476 | 257390 | − | 304 | | Coenzyme F420-reducing | COG1941 | [C] |
| | | | | | | hydrogenase, gamma subunit | | |
| 0268 | 257387 | 257812 | − | 141 | FlpD_1 | Coenzyme F420-reducing | COG1908 | [C] |
| | | | | | | hydrogenase, delta subunit | | |
| 0269 | 257952 | 259379 | + | 475 | | Predicted membrane protein | | |
| 0270 | 259341 | 259781 | − | 146 | | Uncharacterized conserved protein | COG1617 | [S] |
| 0271 | 260022 | 261596 | + | 524 | PheS | Phenylalanyl-tRNA synthetase alpha | COG0016 | [J] |
| | | | | | | subunit | | |
| 0272 | 261597 | 262133 | − | 178 | | Uncharacterized protein | | |
| 0273 | 262262 | 262552 | + | 96 | | Uncharacterized conserved protein | COG1872 | [S] |
| 0274 | 263009 | 263827 | + | 272 | | Uncharacterized protein | | |
| 0275 | 263828 | 265357 | − | 509 | | Isopropylmalate/homocitrate/citramalate | COG0119 | [E] |
| | | | | | | synthase homolog | | |
| 0276 | 265405 | 266217 | − | 270 | | Predicted P-loop ATPase/GTPase | COG4028 | [R] |
| 0277 | 266246 | 266977 | + | 243 | | Predicted Fe—S oxidoreductase | COG5014 | [R] |
| 0278 | 266967 | 268979 | + | 670 | | Predicted membrane protein, family | | |
| | | | | | | MK-41 family | | |
| 0279 | 269014 | 271053 | + | 679 | | Predicted membrane protein, family | | |
| | | | | | | MK-41 family | | |
| 0280 | 271207 | 272499 | − | 430 | HemL | Glutamate-1-semialdehyde | COG0001 | [H] |
| | | | | | | aminotransferase | | |
| 0281 | 272912 | 273337 | − | 141 | RibH | Riboflavin synthase beta-chain | COG0054 | [H] |
| 0282 | 273412 | 274092 | + | 226 | Pcm | Protein-L-isoaspartate | COG2518 | [O] |
| | | | | | | carboxylmethyltransferase | | |
| 0283 | 274537 | 274878 | + | 113 | | Uncharacterized protein conserved | COG4043 | [S] |
| | | | | | | in archaea | | |
| 0284 | 275404 | 276174 | − | 256 | | Metal-dependent hydrolases of the | COG1235 | [R] |
| | | | | | | beta-lactamase superfamily I | | |
| 0285 | 276198 | 277166 | − | 322 | | Uncharacterized protein conserved | COG4079 | [S] |
| | | | | | | in archaea | | |
| 0286 | 277208 | 278248 | − | 346 | | Pyruvate-formate lyase-activating | COG1180 | [O] |
| | | | | | | enzyme | | |
| 0287 | 278245 | 278508 | − | 87 | PaaD | Predicted metal-sulfur cluster | COG2151 | [R] |
| | | | | | | biosynthetic enzyme (MinD N- | | |
| | | | | | | terminal domain family) | | |
| 0288 | 278515 | 278901 | − | 128 | | Flavodoxins | COG0716 | [C] |
| 0289 | 278976 | 280052 | − | 358 | RgyA | Reverse gyrase, subunit A | COG1110 | [L] |
| 0290 | 280321 | 280542 | + | 73 | | Uncharacterized protein | | |
| 0291 | 280561 | 281142 | − | 193 | DCD- | Deoxycytidine | COG0717 | [F] |
| | | | | | DUT | deaminase/diphosphatase | | |
| 0292 | 281158 | 282030 | + | 290 | | Predicted phosphohydrolase | COG1409 | [R] |
| 0293 | 282024 | 282554 | − | 176 | | Uncharacterized conserved protein | COG1641 | [S] |
| 0294 | 282582 | 283844 | + | 420 | | Uncharacterized membrane protein | COG3174 | [S] |
| 0295 | 283841 | 285190 | − | 449 | | tRNA/rRNA cytosine-C5-methylase | COG0144 | [J] |
| 0296 | 285197 | 285631 | − | 144 | | Predicted diguamylate cyclase, | | |
| | | | | | | diverged member of the GGDEF | | |
| | | | | | | superfamily | | |
| 0297 | 285628 | 287196 | − | 522 | | Phosphoglycerate dehydrogenase | COG0111 | [E] |
| | | | | | | and related dehydrogenases | | |
| 0298 | 287326 | 287943 | − | 205 | | Uncharacterized protein specific for | | |
| | | | | | | M. kandleri, MK-1 family | | |
| 0299 | 288089 | 289126 | − | 345 | | Uncharacterized secreted protein | | |
| | | | | | | specific for M. kandleri, MK-3 family | | |
| 0300 | 289372 | 290193 | − | 273 | | Uncharacterized protein | | |
| 0301 | 290810 | 291202 | + | 130 | | Predicted RNA-binding protein | | |
| | | | | | | containing PIN domain, a fragment | | |
| 0302 | 291417 | 292477 | + | 353 | | Predicted RNA-binding protein | | |
| | | | | | | containing PIN domain, a fragment | | |
| 0303 | 292704 | 293645 | + | 313 | | Predicted cysteine protease of the | COG1305 | [E] |
| | | | | | | transglutaminase-like superfamily | | |
| 0304 | 293608 | 294210 | + | 200 | | Uncharacterized protein | | |
| 0305 | 294271 | 295311 | + | 346 | | Uncharacterized protein | | |
| 0306 | 295669 | 296193 | + | 174 | | Uncharacterized protein | | |
| 0307 | 296467 | 297540 | + | 357 | FwdF_1 | Probable formylmethanofuran | COG1145 | [C] |
| | | | | | | dehydrogenase subunit F, ferredoxin | | |
| | | | | | | containing | | |
| 0308 | 297654 | 298370 | − | 238 | | Uncharacterized protein | | |
| 0309 | 298367 | 299322 | − | 321 | | ATPase involved in chromosome | COG1192 | [D] |
| | | | | | | partitioning | | |
| 0310 | 299623 | 300867 | − | 414 | | Orphan DOD family homing | COG1372 | [L] |
| | | | | | | endonuclease | | |
| 0311 | 302118 | 302261 | − | 47 | | Uncharacterized protein | | |
| 0312 | 302397 | 303113 | + | 238 | | Uncharacterized protein specific for | | |
| | | | | | | M. kandleri, MK-42 family | | |
| 0313 | 303210 | 303731 | + | 173 | | Uncharacterized protein specific for | | |
| | | | | | | M. kandleri, MK-22 family | | |
| 0314 | 304168 | 305175 | + | 335 | FocA | Transporter of the formate/nitrite | COG2116 | [P] |
| | | | | | | trasnporter family | | |
| 0315 | 306790 | 307817 | + | 342 | | Predicted hydrolase of the metallo- | COG0595 | [R] |
| | | | | | | beta-lactamase superfamily, a | | |
| | | | | | | fragment | | |
| 0316 | 307991 | 308224 | + | 77 | | Uncharacterized protein | | |
| 0317 | 309026 | 309403 | − | 125 | | Adenine-specific DNA methylase | COG1743 | [L] |
| | | | | | | containing a Zn-ribbon | | |
| 0318 | 309400 | 310002 | − | 200 | | Adenine-specific DNA methylase | COG1743 | [L] |
| | | | | | | containing a Zn-ribbon | | |
| 0319 | 310314 | 310514 | − | 66 | | Phosphoglycerate dehydrogenase | COG0111 | [E] |
| | | | | | | and related dehydrogenases | | |
| 0320 | 310502 | 311260 | − | 252 | SerA | Phosphoglycerate dehydrogenase | COG0111 | [E] |
| | | | | | | and related dehydrogenases | | |
| 0321 | 311717 | 313774 | + | 685 | FdhA | Selenocysteine-containing anaerobic | COG0243 | [C] |
| | | | | | | formate dehydrogenase, subunit | | |
| | | | | | | alpha | | |
| 0322 | 313780 | 314913 | + | 377 | | Coenzyme F420-reducing | COG1035 | [C] |
| | | | | | | hydrogenase, beta subunit | | |
| 0323 | 315226 | 315678 | + | 150 | Fwd_F2 | Probable formylmethanofuran | COG1145 | [C] |
| | | | | | | dehydrogenase subunit F, ferredoxin | | |
| | | | | | | containing | | |
| 0324 | 315855 | 316253 | − | 132 | | Fragment of predicted | | |
| | | | | | | dehydrogenase related to | | |
| | | | | | | phosphoglycerate dehydrogenase | | |
| 0325 | 316385 | 316765 | − | 126 | | Uncharacterized protein specific for | | |
| | | | | | | M. kandleri, MK-1 family | | |
| 0326 | 316791 | 318491 | + | 566 | | Uncharacterized protein specific for | | |
| | | | | | | M. kandleri, MK-5 family | | |
| 0327 | 318525 | 319349 | + | 274 | | Predicted membrane protein | | |
| 0328 | 319527 | 320099 | + | 190 | | Predicted membrane protein | | |
| 0329 | 320696 | 321142 | + | 148 | | Predicted membrane protein | | |
| 0330 | 321611 | 322570 | − | 319 | | Uncharacterized secreted protein | | |
| | | | | | | specific for M. kandleri, MK-30 family | | |
| 0331 | 323201 | 323818 | + | 205 | | Uncharacterized protein specific for | | |
| | | | | | | M. kandleri, MK-1 family | | |
| 0332 | 324061 | 324486 | − | 141 | | Uncharacterized protein conserved | COG4029 | [S] |
| | | | | | | in archaea | | |
| 0333 | 324530 | 325426 | + | 298 | ThrB | Homoserine kinase | COG0083 | [E] |
| 0334 | 325541 | 326770 | − | 409 | CbiD | Cobalamin biosynthesis protein CbiD | COG1903 | [H] |
| 0335 | 326767 | 327753 | − | 328 | GCN3 | Translation initiation factor eIF-2B | COG0182 | [J] |
| | | | | | | alpha subunit | | |
| 0336 | 327856 | 328425 | + | 189 | | Uncharacterized protein | | |
| 0337 | 328419 | 329402 | − | 327 | | Predicted transcriptonal regulator | COG1693 | [S] |
| | | | | | | consisting of wHTH DNA-binding | | |
| | | | | | | domain and an uncharacterized | | |
| | | | | | | domain conserved in archaea | | |
| 0338 | 329455 | 330930 | − | 491 | GlnA | Glutamine synthetase | COG0174 | [E] |
| 0339 | 330946 | 332115 | + | 389 | | Predicted membane protein | | |
| 0340 | 332123 | 333190 | − | 355 | | Predicted Fe—S oxidoreductase | COG1244 | [R] |
| 0341 | 333200 | 333739 | + | 179 | SEN2_1 | tRNA splicing endonuclease | COG1676 | [J] |
| 0342 | 333753 | 333998 | + | 81 | | Predicted transcriptional regulator | | |
| | | | | | | containing DNA-binding HTH domain | | |
| 0343 | 334027 | 335151 | + | 374 | TrpS | Tryptophanyl-tRNA synthetase | COG0180 | [J] |
| 0344 | 335153 | 336226 | + | 357 | | Predicted 23S rRNA methylase | COG1818 & | [R][J] |
| | | | | | | containing THUMP domain | COG0293 | |
| 0345 | 336446 | 336976 | + | 176 | | Uncharacterized protein | | |
| 0346 | 336954 | 337934 | + | 326 | | Uncharacterized protein conserved | COG4030 | [S] |
| | | | | | | in archaea | | |
| 0347 | 337941 | 339344 | − | 467 | | Predicted ABC-type ATPase | COG3044 | [R] |
| 0348 | 339352 | 339930 | − | 192 | | Uncharacterized protein | | |
| 0349 | 339944 | 340672 | − | 242 | | Uncharacterized protein | | |
| 0350 | 340738 | 340962 | + | 74 | | Uncharacterized protein conserved | COG1531 | [S] |
| | | | | | | in archaea | | |
| 0351 | 340922 | 341869 | − | 315 | | Predicted DNA-binding protein | COG1571 | [R] |
| | | | | | | containing a Zn-ribbon | | |
| 0352 | 341898 | 342389 | + | 163 | | Uncharacterized protein | | |
| 0353 | 342379 | 343095 | − | 238 | | Uncharacterized domain conserved | COG4031 | [R] |
| | | | | | | in archaea fused to a metal-binding | | |
| | | | | | | domain | | |
| 0354 | 343122 | 343445 | + | 107 | | Uncharacterized protein | | |
| 0355 | 343442 | 344674 | − | 410 | HMG1 | Hydroxymethylglutaryl-CoA | COG1257 | [I] |
| | | | | | | reductase | | |
| 0356 | 345316 | 345639 | − | 107 | | Predicted membrane protein | | |
| 0357 | 345630 | 346286 | − | 218 | | Peroxiredoxin, predicted regulator of | COG0425 & | [O] |
| | | | | | | disulfide bond formation | COG2044 | [R] |
| 0358 | 346686 | 347828 | − | 380 | | Ferredoxin fused to an | COG1900 & | [S][C] |
| | | | | | | uncharacterized conserved domain | COG1146 | |
| 0359 | 348126 | 348380 | − | 84 | GatC | Asp-tRNAAsn/Glu-tRNAGln | COG0721 | [J] |
| | | | | | | amidotransferase C subunit | | |
| 0360 | 348428 | 349369 | − | 313 | AmpS | Leucyl aminopeptidase | COG2309 | [E] |
| | | | | | | (aminopeptidase T) | | |
| 0361 | 349585 | 350058 | − | 157 | | Archaeal riboflavin synthase | COG1731 | [H] |
| 0362 | 350055 | 351050 | − | 331 | | Predicted metal-binding protein, | | |
| | | | | | | conserved in archaea | | |
| 0363 | 351081 | 352025 | + | 314 | GuaA_1 | PP-ATPase subunit of GMP | COG0519 | [F] |
| | | | | | | synthase | | |
| 0364 | 352038 | 352766 | + | 242 | HisA | Phosphoribosylformimino-5- | COG0106 | [E] |
| | | | | | | aminoimidazole carboxamide | | |
| | | | | | | ribonucleotide (ProFAR) isomerase | | |
| 0365 | 352763 | 353614 | − | 283 | HisG | ATP phosphoribosyltransferase | COG0040 | [E] |
| 0366 | 353673 | 354968 | + | 431 | | Predicted metal-dependent | COG0402 | [FR] |
| | | | | | | hydrolase related to cytosine | | |
| | | | | | | deaminase | | |
| 0367 | 355449 | 356759 | − | 436 | | Uncharacterized protein conserved | | |
| | | | | | | in archaea | | |
| 0368 | 356998 | 358272 | + | 424 | | S-adenosylhomocysteine hydrolase | COG0499 | [H] |
| 0369 | 358478 | 358597 | + | 39 | | Uncharacterized protein | | |
| 0370 | 359581 | 360552 | + | 323 | | tRNA/rRNA cytosine-C5-methylase | COG0144 | [J] |
| 0371 | 360613 | 361065 | + | 150 | | Uncharacterized protein | | |
| 0372 | 361116 | 362186 | − | 356 | MurG | UDP-N-acetylglucosamine:LPS N- | COG0707 | [M] |
| | | | | | | acetylglucosamine transferase | | |
| 0373 | 362211 | 363419 | + | 402 | | Predicted GTPase, probable | COG0012 | [J] |
| | | | | | | translation factor | | |
| 0374 | 363447 | 363887 | + | 146 | | Uncharacterized protein | | |
| 0375 | 364113 | 364475 | − | 120 | GimC | Prefoldin, chaperonin cofactor | COG1382 | [O] |
| 0376 | 364476 | 364727 | − | 83 | | Uncharacterized protein conserved | COG2892 | [S] |
| | | | | | | in archaea | | |
| 0377 | 364743 | 365321 | − | 192 | IMP4 | Predicted exosome subunit | COG2136 | [J] |
| | | | | | | containing the IMP4 domain present | | |
| | | | | | | in small nuclear ribonucleoprotein | | |
| 0378 | 365318 | 365473 | − | 51 | RPC10 | DNA-directed RNA polymerase | COG1996 | [K] |
| | | | | | | subunit RPC10 (contains C4-type | | |
| | | | | | | Zn-finger) | | |
| 0379 | 365476 | 365745 | − | 89 | RPL43A | Ribosomal protein L37AE/L43A | COG1997 | [J] |
| 0380 | 365802 | 366605 | − | 267 | | Predicted exosome subunit, | COG2123 | [J] |
| | | | | | | predicted exoribonuclease related to | | |
| | | | | | | RNase PH | | |
| 0381 | 366607 | 367326 | − | 239 | Rph | Predicted exosome subunit, RNase | COG0689 | [J] |
| | | | | | | PH | | |
| 0382 | 367335 | 368054 | − | 239 | RRP4 | Predicted exosome subunit, RNA- | COG1097 | [J] |
| | | | | | | binding protein Rrp4 (contain S1 | | |
| | | | | | | domain and KH domain) | | |
| 0383 | 368062 | 369129 | − | 355 | | Predicted hydrolase related to | COG1363 | [G] |
| | | | | | | cellulase M | | |
| 0384 | 369130 | 369852 | − | 240 | | Predicted exosome subunit | COG1500 | [J] |
| 0385 | 369855 | 370595 | − | 246 | HslV_1 | Protease subunit of the proteasome | COG0638 | [O] |
| 0386 | 370595 | 371089 | − | 164 | POP5 | Predicted exosome subunit, RNase | COG1369 | [J] |
| | | | | | | P subunit P14 | | |
| 0387 | 371086 | 371820 | − | 244 | RPP30 | Ribonuclease P subunit Rpp30 | COG1603 | [J] |
| 0388 | 371817 | 372278 | − | 153 | | Predicted exosome subunit | COG1325 | [J] |
| 0389 | 372312 | 372905 | − | 197 | RPL15A | Ribosomal protein L15E | COG1632 | [J] |
| 0390 | 372970 | 373710 | − | 246 | | Predicted HD-superfamily hydrolase | COG3481 | [R] |
| 0391 | 373774 | 375273 | + | 499 | | Isopropylmalate synthase | COG0119 | [E] |
| 0392 | 375270 | 376295 | − | 341 | ComC | L-sulfolactate dehydrogenase | COG2055 | [C] |
| 0393 | 376299 | 376865 | − | 188 | ComE | Sulfopyruvate decarboxylase, beta | COG0028 | [EH] |
| | | | | | | subunit | | |
| 0394 | 376933 | 377703 | + | 256 | ComA | (2R)-phospho-3-sulfolactate | COG1809 | [S] |
| | | | | | | synthase (PSL synthase) | | |
| 0395 | 377707 | 378210 | + | 167 | ComD | Sulfopyruvate decarboxylase, alpha | COG4032 | [R] |
| | | | | | | subunit | | |
| 0396 | 378195 | 379127 | − | 310 | | SAM-dependent methyltransferase | COG0500 | [QR] |
| 0397 | 379182 | 379682 | − | 166 | SEN2_2 | tRNA splicing endonuclease | COG1676 | [J] |
| 0398 | 379633 | 379872 | − | 79 | | Ribosomal protein S4 and related | COG0522 | [J] |
| | | | | | | proteins | | |
| 0399 | 379869 | 380348 | − | 159 | | Uncharacterized protein conserved | COG1931 | [S] |
| | | | | | | in archaea | | |
| 0400 | 380305 | 380895 | − | 196 | CoaE | Dephospho-CoA kinase | COG0237 | [H] |
| 0401 | 380949 | 382022 | − | 357 | | Uncharacterized conserved protein | COG1415 | [S] |
| 0402 | 382222 | 383223 | + | 333 | | Predicted RNA-binding protein | COG1818 | [R] |
| | | | | | | containing THUMP domain | | |
| 0403 | 383306 | 384133 | + | 275 | TrpA | Tryptophan synthase alpha chain | COG0159 | [E] |
| 0404 | 385121 | 386080 | − | 319 | ECM27_1 | Ca2+/Na+ antiporter | COG0530 | [P] |
| 0405 | 386095 | 386403 | + | 102 | | Zn-ribbon-containing protein | | |
| 0406 | 386375 | 386872 | + | 165 | MobA | Molybdopterin-guanine dinucleotide | COG0746 | [H] |
| | | | | | | biosynthesis protein A | | |
| 0407 | 386862 | 388859 | − | 665 | | Uncharacterized protein conserved | COG2433 | [S] |
| | | | | | | in archaea | | |
| 0408 | 388923 | 389306 | + | 127 | | Uncharacterized membrane | COG1714 | [S] |
| | | | | | | protein/domain | | |
| 0409 | 389293 | 389832 | − | 179 | | Predicted intracellular | COG0693 | [R] |
| | | | | | | protease/amidase | | |
| 0410 | 389846 | 390271 | + | 141 | | Uncharacterized protein conserved | COG4081 | [S] |
| | | | | | | in archaea | | |
| 0411 | 390268 | 390561 | + | 97 | | Uncharacterized protein conserved | COG4033 | [S] |
| | | | | | | in archaea | | |
| 0412 | 390558 | 391289 | − | 243 | RplB | Ribosomal protein L2 | COG0090 | [J] |
| 0413 | 391302 | 391589 | − | 95 | RplW | Ribosomal protein L23 | COG0089 | [J] |
| 0414 | 391593 | 392375 | − | 260 | RplD | Ribosomal protein L4 | COG0088 | [J] |
| 0415 | 392390 | 393475 | − | 361 | RplC | Ribosomal protein L3 | COG0087 | [J] |
| 0416 | 393619 | 394368 | + | 249 | | Uncharacterized protein | | |
| 0417 | 394373 | 394654 | + | 93 | RPL42A | Ribosomal protein L44E | COG1631 | [J] |
| 0418 | 394669 | 394890 | + | 73 | RPS27A | Ribosomal protein S27E | COG2051 | [J] |
| 0419 | 394890 | 395693 | + | 267 | SUI2 | Translation initiation factor elF2- | COG1093 | [J] |
| | | | | | | alpha | | |
| 0420 | 395697 | 395897 | + | 66 | | Predicted Zn-ribbon-containing RNA- | COG2260 | [J] |
| | | | | | | binding protein | | |
| 0421 | 395901 | 396710 | + | 269 | | Uncharacterized enzyme of the ATP- | COG2047 | [R] |
| | | | | | | grasp superfamily | | |
| 0422 | 397017 | 397583 | + | 188 | | Uncharacterized membrane protein | | |
| 0423 | 397587 | 398081 | + | 164 | | Uncharacterized membrane protein, | COG4083 | [S] |
| | | | | | | conserved in archaea | | |
| 0424 | 398083 | 399336 | + | 417 | | Uncharacterized conserved protein | COG1379 | [S] |
| 0425 | 399333 | 400784 | + | 483 | | Predicted metal-dependent | | |
| | | | | | | hydrolase of the TIM-barrel fold | | |
| 0426 | 400786 | 401517 | + | 243 | | Predicted metal-dependent | COG2159 | [R] |
| | | | | | | hydrolase of the TIM-barrel fold | | |
| 0427 | 401719 | 402249 | + | 176 | | Uncharacterized conserved protein | | |
| 0428 | 402254 | 402685 | + | 143 | | Uncharacterized conserved protein | COG2138 | [S] |
| 0429 | 402699 | 403346 | + | 215 | AroD | 3-dehydroquinate dehydratase | COG0710 | [E] |
| 0430 | 403335 | 404072 | − | 245 | | Flavoprotein involved in thiazole | COG1635 | [H] |
| | | | | | | biosynthesis | | |
| 0431 | 404095 | 404466 | − | 123 | | Uncharacterized protein conserved | | |
| | | | | | | in archaea | | |
| 0432 | 404463 | 404834 | − | 123 | | Uncharacterized protein | | |
| 0433 | 404865 | 405650 | − | 261 | SurE | Predicted acid phosphatase | COG0496 | [R] |
| 0434 | 405568 | 406407 | − | 279 | DapF | Diaminopimelate epimerase | COG0253 | [E] |
| 0435 | 406436 | 407173 | − | 245 | DapD | Tetrahydrodipicolinate N- | COG2171 | [E] |
| | | | | | | succinyltransferase | | |
| 0436 | 407170 | 407748 | − | 192 | PabA | Anthranilate/para-aminobenzoate | COG0512 | [EH] |
| | | | | | | synthase component II | | |
| 0437 | 407723 | 409129 | − | 468 | TrpE | Anthranilate/para-aminobenzoate | COG0147 | [EH] |
| | | | | | | synthase component I | | |
| 0438 | 409120 | 409710 | − | 196 | | Uncharacterized membrane protein | COG1300 | [S] |
| 0439 | 409925 | 411559 | − | 544 | | Phenylalanyl-tRNA synthetase alpha | COG2024 | [J] |
| | | | | | | subunit, archaeal type | | |
| 0440 | 411681 | 412184 | + | 167 | | Uncharacterized protein | | |
| 0441 | 412195 | 412410 | + | 71 | | Uncharacterized protein | | |
| 0442 | 412377 | 413771 | + | 464 | | Uncharacterized protein | | |
| 0443 | 413745 | 414398 | − | 217 | | Predicted RNA-binding protein of the | COG2178 | [J] |
| | | | | | | translin family | | |
| 0444 | 414419 | 415777 | − | 452 | | tRNA/rRNA cytosine-C5-methylase | COG0144 | [J] |
| 0445 | 415803 | 416762 | + | 319 | | Uncharacterized protein conserved | COG4034 | [S] |
| | | | | | | in archaea | | |
| 0446 | 416913 | 417761 | + | 282 | NadC | Nicotinate-nucleotide | COG0157 | [H] |
| | | | | | | pyrophosphorylase | | |
| 0447 | 417779 | 418756 | − | 325 | | Uncharacterized protein | | |
| 0448 | 418732 | 419226 | − | 164 | IlvB_1 | Acetolactate synthase large subunit | COG0028 | [EH] |
| 0449 | 419733 | 420248 | + | 171 | | Predicted transcription factor, | COG1813 | [K] |
| | | | | | | homolog of eukaryotic MBF1 | | |
| 0450 | 420252 | 420827 | − | 191 | | Uncharacterized protein | | |
| 0451 | 420814 | 422439 | − | 541 | FtsA | Actin-like ATPase involved in cell | COG0849 | [D] |
| 0452 | 422444 | 422755 | − | 103 | | Predicted pyrophosphatase | COG1694 | [R] |
| 0453 | 422752 | 423300 | − | 182 | | SAM-dependent methyltransferase | COG0500 | [QR] |
| 0454 | 423263 | 423655 | − | 130 | | Uncharacterized protein conserved | COG1844 | [S] |
| | | | | | | in archaea | | |
| 0455 | 423708 | 424130 | + | 140 | | Uncharacterized protein conserved | COG4921 | [S] |
| | | | | | | in archaea | | |
| 0456 | 424099 | 425370 | + | 423 | | GTPase of the HfIX family | COG2262 | [R] |
| 0457 | 425367 | 425804 | − | 145 | | Predicted transcription regulator | | |
| | | | | | | containing the wHTH DNA-binding | | |
| | | | | | | domain | | |
| 0458 | 425875 | 426513 | − | 212 | | FOG: CBS domain | COG0517 | [R] |
| 0459 | 426513 | 427271 | − | 252 | | Ferredoxin | COG1145 | [C] |
| 0460 | 427268 | 427711 | − | 147 | EhaP | Ferredoxin | COG1145 | [C] |
| 0461 | 427686 | 428825 | − | 379 | EhbK | Ferredoxin | COG1145 | [C] |
| 0462 | 428829 | 429407 | − | 192 | EhaQ | Ferredoxin | COG1145 | [C] |
| 0463 | 429389 | 430618 | − | 409 | EhaO | Ni,Fe-hydrogenase III large subunit | COG3261 | [C] |
| 0464 | 430599 | 431087 | − | 162 | EhaN | Ni,Fe-hydrogenase III small subunit | COG3260 | [C] |
| 0465 | 431084 | 431524 | − | 146 | EhaM | Uncharacterized protein conserved | COG4084 | [S] |
| | | | | | | in archaea | | |
| 0466 | 431521 | 431865 | − | 114 | EhaL | Uncharacterized membrane protein, | COG4035 | [S] |
| | | | | | | conserved in archaea | | |
| 0467 | 431862 | 432101 | − | 79 | | Uncharacterized protein | | |
| 0468 | 432112 | 432963 | − | 283 | EhaJ | Membrane protein related to formate | COG0650 | [C] |
| | | | | | | hydrogenlyase subunit 4 | | |
| 0469 | 432967 | 433170 | − | 67 | | Uncharacterized protein | | |
| 0470 | 433183 | 433854 | − | 223 | EhaH | Uncharacterized membrane protein, | COG4078 | [S] |
| | | | | | | conserved in archaea | | |
| 0471 | 433838 | 434515 | − | 225 | EhaG | Uncharacterized membrane protein, | COG4036 | [S] |
| | | | | | | conserved in archaea | | |
| 0472 | 434512 | 435021 | − | 169 | EhaF | Uncharacterized membrane protein, | COG4037 | [S] |
| | | | | | | conserved in archaea | | |
| 0473 | 434978 | 435265 | − | 95 | EhaE | Uncharacterized membrane protein, | COG4038 | [S] |
| | | | | | | conserved in archaea | | |
| 0474 | 435258 | 435500 | − | 80 | EhaD | Uncharacterized membrane protein, | COG4039 | [S] |
| | | | | | | conserved in archaea | | |
| 0475 | 435497 | 435760 | − | 87 | EhaC | Uncharacterized membrane protein, | COG4040 | [S] |
| | | | | | | conserved in archaea | | |
| 0476 | 435757 | 436278 | − | 173 | EhaB | Uncharacterized membrane protein, | COG4041 | [S] |
| | | | | | | conserved in archaea | | |
| 0477 | 436275 | 436568 | − | 97 | EhaA | Uncharacterized membrane protein, | COG4042 | [S] |
| | | | | | | conserved in archaea | | |
| 0478 | 436592 | 437665 | + | 357 | | Predicted ATPase, MoxR-like family | COG0714 | [R] |
| | | | | | | of the AAA+ class | | |
| 0479 | 438675 | 440018 | + | 447 | | Uncharacterized protein containing a | COG2425 | [R] |
| | | | | | | von Willebrand factor type A (vWA) | | |
| | | | | | | domain | | |
| 0480 | 440015 | 440614 | − | 199 | | Uncharacterized protein | | |
| 0481 | 440625 | 441635 | + | 336 | | Predicted NTPase | | |
| 0482 | 441586 | 442755 | − | 389 | | Predicted transcriptional regulators, | COG2896 & | [H][K] |
| | | | | | | consists of a molybdenum cofactor | COG1522 | |
| | | | | | | biosynthesis enzyme fused to a HTH | | |
| | | | | | | DNA-binding domain | | |
| 0483 | 442817 | 444034 | − | 405 | LysA | Diaminopimelate decarboxylase | COG0019 | [E] |
| 0484 | 444079 | 444621 | − | 180 | | Uncharacterized protein conserved | COG4077 | [S] |
| | | | | | | in archaea | | |
| 0485 | 444618 | 445595 | − | 325 | | Uncharacterized conserved protein | COG1469 | [S] |
| 0486 | 445677 | 449426 | + | 1249 | | ATPases of the AAA+ class & | COG0464 & | [O][L] |
| | | | | | | Intein/homing endonuclease | COG1372 | |
| 0487 | 449457 | 449915 | + | 152 | | Uncharacterized conserved protein | COG1656 | [S] |
| 0488 | 449908 | 450531 | + | 207 | | Uncharacterized conserved protein | COG2078 | [S] |
| 0489 | 450514 | 451131 | − | 205 | | Uncharacterized proteins, LmbE | COG2120 | [S] |
| | | | | | | homologs | | |
| 0490 | 451128 | 452138 | − | 336 | | Glycosyltransferase, probably | COG1215 | [M] |
| | | | | | | involved in cell wall biogenesis | | |
| 0491 | 452156 | 453241 | − | 361 | CarA | Carbamoylphosphate synthase small | COG0505 | [EF] |
| | | | | | | subunit | | |
| 0492 | 453622 | 454674 | + | 350 | | Archaea-specific enzyme related to | COG1411 & | [R][S] |
| | | | | | | ProFAR isomerase (HisA) and | COG4043 | |
| | | | | | | containing an additional | | |
| | | | | | | uncharacterized domain | | |
| 0493 | 454678 | 455469 | − | 263 | | Uncharacterized protein conserved | COG4044 | [S] |
| | | | | | | in archaea | | |
| 0494 | 455483 | 456004 | − | 173 | | Predicted HD superfamily hydrolase | COG1418 | [R] |
| 0495 | 456001 | 456582 | − | 193 | TFA1 | Transcription initiation factor IIE, | COG1675 | [K] |
| | | | | | | large subunit | | |
| 0496 | 456587 | 457279 | − | 230 | | Uncharacterized protein | | |
| 0497 | 457283 | 459457 | − | 724 | PurL_2 | Phosphoribosylformylglycinamidine | COG0046 | [F] |
| | | | | | | (FGAM) synthase, synthetase | | |
| | | | | | | domain | | |
| 0498 | 459523 | 460449 | − | 308 | | Fe—S oxidoreductase | COG0247 | [C] |
| 0499 | 460425 | 461879 | − | 484 | | Predicted ribonuclease of the G/E | COG1530 | [J] |
| | | | | | | family | | |
| 0500 | 461906 | 462208 | + | 100 | HisI_1 | Phosphoribosyl-ATP | COG0140 | [E] |
| | | | | | | pyrophosphohydrolase | | |
| 0501 | 462591 | 463937 | + | 448 | | Uncharacterized FAD-dependent | COG2509 | [R] |
| | | | | | | dehydrogenase | | |
| 0502 | 463950 | 464894 | + | 314 | | Uncharacterized protein conserved | | |
| | | | | | | in archaea | | |
| 0503 | 465077 | 466090 | + | 337 | | Predicted aminopeptidase | COG2234 | [R] |
| 0504 | 466093 | 466626 | + | 177 | | Amidase related to nicotinamidase | COG1335 | [Q] |
| 0505 | 466623 | 467993 | + | 456 | cDPGS | Cyclic 2,3-diphosphoglycerate- | COG2403 | [R] |
| | | | | | | synthetase | | |
| 0506 | 467990 | 468223 | − | 77 | HHT1_1 | Histone H3/H4 | COG2036 | [L] |
| 0507 | 468287 | 469069 | + | 260 | | Predicted nuclease of the RecB | COG1637 | [L] |
| | | | | | | family | | |
| 0508 | 469072 | 469722 | + | 216 | TrpF | Phosphoribosylanthranilate | COG0135 | [E] |
| | | | | | | isomerase | | |
| 0509 | 469706 | 473605 | − | 1299 | | Predicted protein of the CobN/Mg- | COG1429 | [H] |
| | | | | | | chelatase family | | |
| 0510 | 473846 | 475135 | + | 429 | | Predicted Zn-dependent | | |
| | | | | | | metallopeptidase | | |
| 0511 | 475141 | 476415 | + | 424 | | Terpene cyclase/mutase family | COG1657 | [I] |
| | | | | | | protein | | |
| 0512 | 476375 | 477415 | − | 346 | Top6A | DNA topoisomerase VI, subunit A | COG1697 | [L] |
| 0513 | 477452 | 478060 | − | 202 | | Predicted RNA-binding protein | COG1094 | [R] |
| | | | | | | containing KH domain) | | |
| 0514 | 478065 | 478856 | − | 263 | RIO1_1 | Serine/threonine protein kinase | COG1718 | [TD] |
| | | | | | | involved in cell cycle control | | |
| 0515 | 478853 | 479188 | − | 111 | InfA | Translation initiation factor IF-1 | COG0361 | [J] |
| 0516 | 479449 | 480423 | − | 324 | TyrS | Tyrosyl-tRNA synthetase | COG0162 | [J] |
| 0517 | 480456 | 481520 | − | 354 | NMD3 | NMD protein affecting ribosome | COG1499 | [J] |
| | | | | | | stability and mRNA decay | | |
| 0518 | 481521 | 482639 | − | 372 | | Uncharacterized protein conserved | COG4046 | [S] |
| | | | | | | in archaea | | |
| 0519 | 483150 | 483854 | − | 234 | LasT | rRNA methylase | COG0565 | [J] |
| 0520 | 483880 | 485811 | + | 643 | | ABC-type ATPase fused to a | COG2401 | [R] |
| | | | | | | predicted acetyltransferase domain | | |
| 0521 | 485808 | 486257 | − | 149 | | Universal stress protein UspA and | COG0589 | [T] |
| | | | | | | related nucleotide-binding proteins | | |
| 0522 | 486337 | 486723 | + | 128 | | Zn-finger-containing protein | COG2158 | [R] |
| 0523 | 486677 | 487123 | − | 148 | | Uncharacterized protein conserved | COG4933 | [S] |
| | | | | | | in archaea | | |
| 0524 | 487264 | 488313 | − | 349 | Mer | Coenzyme F420-dependent N5,N10- | COG2141 | [C] |
| | | | | | | methylene tetrahydromethanopterin | | |
| | | | | | | reductase | | |
| 0525 | 488504 | 489094 | + | 196 | | FOG: CBS domain | COG0517 | [R] |
| 0526 | 489122 | 489958 | + | 278 | | FOG: CBS domain | COG0517 | [R] |
| 0527 | 489930 | 492113 | − | 727 | | Uncharacterized membrane protein | | |
| | | | | | | specific for M. kandleri, MK-13 family | | |
| 0528 | 492151 | 493311 | + | 386 | | ATP-dependent DNA ligase, | COG1423 | [L] |
| | | | | | | homolog of eukaryotic ligase III | | |
| 0529 | 493316 | 493792 | + | 158 | | Soluble P-type ATPase | COG4087 | [R] |
| 0530 | 493786 | 495066 | + | 426 | PyrC | Dihydroorotase | COG0044 | [F] |
| 0531 | 495059 | 496756 | + | 565 | IlvB_2 | Acetolactate synthase, large subunit | COG0028 | [EH] |
| 0532 | 497119 | 492505 | + | 128 | | Rubrerythrin | COG1592 | [C] |
| 0533 | 497572 | 498342 | + | 256 | | Predicted metal-dependent | COG1099 | [R] |
| | | | | | | hydrolase of the TIM-barrel fold | | |
| 0534 | 498533 | 499327 | + | 264 | | Uncharacterized protein conserved | COG1810 | [S] |
| | | | | | | in archaea | | |
| 0535 | 499336 | 499764 | − | 142 | | Uncharacterized protein | | |
| 0536 | 499901 | 501817 | + | 638 | | 6Fe—6S prismane cluster-containing | COG1151 | [C] |
| | | | | | | carbon monoxide dehydrogenase | | |
| | | | | | | catalytic subunit | | |
| 0537 | 501838 | 502950 | + | 370 | | Coenzyme F420-reducing | COG3259 | [C] |
| | | | | | | hydrogenase, alpha subunit | | |
| 0538 | 502964 | 503680 | + | 238 | | Coenzyme F420-reducing | COG1941 | [C] |
| | | | | | | hydrogenase, gamma subunit | | |
| 0539 | 503796 | 504623 | + | 275 | | Coenzyme F420-reducing | COG1035 | [C] |
| | | | | | | hydrogenase, beta subunit | | |
| 0540 | 504665 | 505129 | + | 154 | | Uncharacterized protein | | |
| 0541 | 505144 | 505872 | + | 242 | | Uncharacterized protein conserved | COG4047 | [S] |
| | | | | | | in archaea | | |
| 0542 | 506098 | 506835 | + | 245 | | Predicted transcriptional regulator | COG0640 & | [K][R] |
| | | | | | | consisting of a V4R domain and a | COG1719 | |
| | | | | | | DNA-binding HTH domain | | |
| 0543 | 506807 | 507148 | − | 113 | | Uncharacterized conserved protein, | COG0599 | [S] |
| | | | | | | homolog of gamma- | | |
| | | | | | | carboxymuconolactone | | |
| | | | | | | decarboxylase subunit | | |
| 0544 | 507396 | 509270 | + | 624 | ThrS | Threonyl-tRNA synthetase | COG0441 | [J] |
| 0545 | 509272 | 509775 | − | 167 | IlvH | Acetolactate synthase, small subunit | COG0440 | [E] |
| 0546 | 509917 | 510690 | + | 257 | TatD | Mg-dependent DNase | COG0084 | [L] |
| 0547 | 510899 | 511126 | + | 75 | | Uncharacterized protein | | |
| 0548 | 511128 | 511655 | + | 175 | | Predicted Zn-dependent protease | COG1913 | [R] |
| 0549 | 511613 | 512170 | + | 185 | | Acetyltransferase | COG0456 | [R] |
| 0550 | 512386 | 513675 | + | 429 | GltB_1 | Glutamate synthase subunit 2 | COG0069 | [E] |
| 0551 | 513689 | 514252 | + | 187 | GuaA_2 | Glutamine amidotransferase subunit | COG0518 | [F] |
| | | | | | | of GMP synthase | | |
| 0552 | 514237 | 515541 | + | 434 | NhaP | NhaP-type Na+/H+ or K+/H+ | COG0025 | [P] |
| | | | | | | antiporter | | |
| 0553 | 515607 | 516128 | + | 173 | MoaB | Molybdopterin biosynthesis enzyme | COG0521 | [H] |
| 0554 | 516136 | 516606 | − | 156 | MoaC | Molybdenum cofactor biosynthesis | COG0315 | [H] |
| | | | | | | enzyme | | |
| 0555 | 518513 | 518920 | + | 135 | | DNA endonuclease related to intein- | COG3780 | [L] |
| | | | | | | encoded endonucleases | | |
| 0556 | 519350 | 520219 | − | 289 | | RecA-superfamily ATPase | COG0467 | [T] |
| | | | | | | implicated in signal transduction | | |
| 0557 | 520203 | 520772 | − | 189 | | Uncharacterized protein conserved | COG1790 | [S] |
| | | | | | | in archaea | | |
| 0558 | 521047 | 522033 | + | 328 | | beta-Ribofuranosylaminobenzene 5′- | COG1907 | [R] |
| | | | | | | phosphate synthase (beta-RFAP | | |
| | | | | | | synthase) | | |
| 0559 | 522045 | 523307 | + | 420 | SIK1 | Protein implicated in ribosomal | COG1498 | [J] |
| | | | | | | biogenesis, Nop56p homolog | | |
| 0560 | 523355 | 524053 | + | 232 | NOP1 | Fibrillarin-like rRNA methylase | COG1889 | [J] |
| 0561 | 524303 | 525274 | + | 323 | PitA | Phosphate/sulphate permeases | COG0306 | [P] |
| 0562 | 525271 | 525885 | + | 204 | | Uncharacterized protein | | |
| 0563 | 525882 | 526838 | + | 318 | PyrD | Dihydroorotate dehydrogenase | COG0167 | [F] |
| 0564 | 526826 | 527614 | + | 262 | PyrK | Dihydroorotate dehydrogenase | COG0543 | [HC] |
| | | | | | | electron transfer subunit similar to 2- | | |
| | | | | | | polyprenylphenol hydroxylase and | | |
| | | | | | | related flavodoxin oxidoreductases | | |
| 0565 | 527589 | 528335 | + | 248 | | Glycosyltransferase involved in cell | COG0463 | [M] |
| | | | | | | wall biogenesis | | |
| 0566 | 528389 | 529435 | + | 348 | Exo | 5′-3′ exonuclease | COG0258 | [L] |
| 0567 | 529503 | 530324 | − | 273 | | Uncharacterized membrane protein, | COG3366 | [S] |
| | | | | | | conserved in archaea | | |
| 0568 | 530382 | 531287 | + | 301 | | L-alanine-DL-glutamate epimerase | COG4948 | [MR] |
| | | | | | | and related enzymes of enolase | | |
| | | | | | | superfamily | | |
| 0569 | 531423 | 532460 | + | 345 | | Uncharacterized conserved protein | COG3367 | [S] |
| 0570 | 532442 | 532792 | − | 116 | | Uncharacterized protein conserved | COG4048 | [S] |
| | | | | | | in archaea | | |
| 0571 | 532866 | 533444 | + | 192 | | Uncharacterized metal-binding | COG4887 | [R] |
| | | | | | | protein conserved in archaea | | |
| 0572 | 533451 | 534368 | − | 305 | HdrB | Heterodisulfide reductase, subunit B | COG2048 | [C] |
| 0573 | 534381 | 534959 | − | 192 | HdrC | Heterodisulfide reductase, subunit C | COG1150 | [C] |
| 0574 | 535060 | 535818 | + | 252 | | Transcriptional regulator of the LysR | COG0583 | [K] |
| | | | | | | family | | |
| 0575 | 536146 | 536853 | − | 235 | | Uncharacterized protein conserved | COG2043 | [S] |
| | | | | | | in archaea | | |
| 0576 | 536956 | 537345 | + | 129 | | Predicted transcriptional regulator | COG3355 | [K] |
| 0577 | 537359 | 537568 | + | 69 | | Predicted nucleic-acid-binding | COG4049 | [R] |
| | | | | | | protein containing an archaeal-type | | |
| | | | | | | C2H2 Zn-finger | | |
| 0578 | 537647 | 538099 | − | 150 | TagD | Cytidylyltransferase | COG0615 | [MI] |
| 0579 | 538169 | 538615 | + | 148 | | Uncharacterized protein conserved | COG4050 | [S] |
| | | | | | | in archaea | | |
| 0580 | 538628 | 539851 | + | 407 | | Activator of 2-hydroxyglutaryl-CoA | COG1924 | [I] |
| | | | | | | dehydratase (HSP70-class ATPase | | |
| | | | | | | domain) | | |
| 0581 | 539864 | 540490 | + | 208 | | Uncharacterized protein conserved | COG4051 | [S] |
| | | | | | | in archaea | | |
| 0582 | 540487 | 541335 | + | 282 | | Predicted Fe—S oxidoreductase | COG0535 | [R] |
| 0583 | 541340 | 542266 | + | 308 | | Uncharacterized protein conserved | COG4052 | [R] |
| | | | | | | in archaea, related to methyl | | |
| | | | | | | coenzyme M reductase II, operon | | |
| | | | | | | protein C (mtrC) | | |
| 0584 | 542479 | 543207 | − | 242 | | Uncharacterized protein specific for | | |
| | | | | | | M. kandleri, MK-1 family | | |
| 0585 | 543481 | 544767 | + | 428 | | Uncharacterized protein | | |
| 0586 | 545004 | 545954 | + | 316 | PRI1 | Eukaryotic-type DNA primase, | COG1467 | [L] |
| | | | | | | catalytic (small) subunit | | |
| 0587 | 545951 | 546523 | + | 190 | | Uncharacterized conserved protein | COG1920 | [S] |
| 0588 | 546629 | 547708 | + | 359 | | Predicted ATP-utilizing enzyme of | COG1759 | [R] |
| | | | | | | the ATP-grasp superfamily (probably | | |
| | | | | | | carboligase) | | |
| 0589 | 547818 | 549116 | + | 432 | ThiD | Hydroxymethylpyrimidine/phosphomethylpyrimidine | COG0351 & | [H][S] |
| | | | | | | kinase fused to | COG1992 | |
| | | | | | | uncharacterized conserved domain | | |
| 0590 | 549121 | 549732 | + | 203 | | Uncharacterized protein | | |
| 0591 | 549969 | 550763 | + | 264 | | Uncharacterized secreted protein | | |
| | | | | | | specific for M. kandleri with repeats, | | |
| | | | | | | MK-6 family | | |
| 0592 | 550754 | 551515 | + | 253 | | Uncharacterized protein specific for | | |
| | | | | | | M. kandleri with repeats, MK-6 family | | |
| 0593 | 551518 | 551976 | + | 152 | | Uncharacterized protein specific for | | |
| | | | | | | M. kandleri, MK-6 family | | |
| 0594 | 552664 | 552933 | + | 89 | | Uncharacterized protein | | |
| 0595 | 553054 | 553923 | + | 289 | | Predicted archaea-specific | COG2521 | [R] |
| | | | | | | methyltransferase | | |
| 0596 | 553892 | 554356 | − | 154 | | Uncharacterized conserved protein | COG1833 | [S] |
| 0597 | 554373 | 556742 | + | 789 | | Uncharacterized membrane protein | | |
| | | | | | | specific for M. kandleri, MK-13 family | | |
| 0598 | 556733 | 557212 | + | 159 | | Uncharacterized protein | | |
| 0599 | 557225 | 558235 | + | 336 | | Predicted methyltransferase | COG2520 | [R] |
| 0600 | 558229 | 558702 | − | 157 | | RecB-family nuclease | COG4080 | [L] |
| 0601 | 558753 | 559712 | + | 319 | | ABC-type | COG0715 | [P] |
| | | | | | | nitrate/sulfonate/bicarbonate | | |
| | | | | | | transport systems, periplasmic | | |
| | | | | | | components | | |
| 0602 | 559712 | 560467 | + | 251 | | ABC-type | COG0600 | [P] |
| | | | | | | nitrate/sulfonate/bicarbonate | | |
| | | | | | | transport system, permease | | |
| | | | | | | component | | |
| 0603 | 560458 | 561198 | + | 246 | | ABC-type | COG1116 | [P] |
| | | | | | | nitrate/sulfonate/bicarbonate | | |
| | | | | | | transport system, ATPase | | |
| | | | | | | component | | |
| 0604 | 561299 | 562033 | + | 244 | | tRNA-dihydrouridine synthase | COG0042 | [J] |
| 0605 | 562156 | 563580 | − | 474 | | Transposase and inactivated | COG0675 | [L] |
| | | | | | | derivatives | | |
| 0606 | 563941 | 565068 | + | 375 | Kch_1 | Kef-type K+ transport systems, | COG1226 & | [P][R] |
| | | | | | | predicted NAD-binding component & | COG1827 | |
| | | | | | | Predicted small molecule binding | | |
| | | | | | | protein (contains 3H domain) | | |
| 0607 | 566155 | 567084 | − | 309 | ThiL | Thiamine monophosphate kinase | COG0611 | [H] |
| 0608 | 567068 | 567601 | + | 177 | NIP7 | Predicted RNA-binding protein | COG1374 | [J] |
| | | | | | | involved in ribosomal biogenesis, | | |
| | | | | | | contains PUA domain | | |
| 0609 | 567603 | 568250 | + | 215 | | Predicted metabolic regulator | COG1707 | [R] |
| | | | | | | containing the ACT domain | | |
| 0610 | 568264 | 568827 | + | 187 | | Adenine/guanine | COG0503 | [F] |
| | | | | | | phosphoribosyltransferases and | | |
| | | | | | | related PRPP-binding proteins | | |
| 0611 | 568818 | 569834 | − | 338 | | Uncharacterized protein conserved | COG1665 | [S] |
| | | | | | | in archaea | | |
| 0612 | 569848 | 570273 | + | 141 | | Predicted DNA-binding protein with | COG1661 | [R] |
| | | | | | | PD1-like DNA-binding motif | | |
| 0613 | 570239 | 571111 | − | 290 | Map | Methionine aminopeptidase | COG0024 | [J] |
| 0614 | 571138 | 571800 | + | 220 | | Uncharacterized protein | | |
| 0615 | 572038 | 572349 | − | 103 | | Predicted metal-binding protein | COG1745 | [R] |
| | | | | | | conserved in archaea | | |
| 0616 | 572365 | 573780 | − | 471 | LonB | Predicted ATP-dependent protease | COG1067 | [O] |
| 0617 | 573932 | 575161 | − | 409 | DnaG | DNA primase (bacterial type) | COG0358 | [L] |
| 0618 | 575280 | 576332 | − | 350 | GapA | Glyceraldehyde-3-phosphate | COG0057 | [G] |
| | | | | | | dehydrogenase | | |
| 0619 | 576853 | 577878 | − | 341 | SUA7_1 | Transcription initiation factor IIB | COG1405 | [K] |
| 0620 | 578231 | 579271 | − | 346 | SelA | Selenocysteine synthase | COG1921 | [E] |
| 0621 | 579226 | 580800 | − | 524 | | Predicted RNA modification enzyme | COG5270 & | [J][EH] |
| | | | | | | consisting of a 3-phosphoadenosine | COG0175 | |
| | | | | | | 5-phosphosulfate sulfotransferase | | |
| | | | | | | fused to RNA-binding PUA domain | | |
| 0622 | 580781 | 582307 | − | 508 | ArgH | Argininosuccinate lyase | COG0165 | [E] |
| 0623 | 582471 | 583118 | + | 215 | | Predicted cysteine protease of the | COG1305 | [E] |
| | | | | | | transglutaminase-like supefamily | | |
| 0624 | 583203 | 583934 | + | 243 | | Uncharacterized protein conserved | COG1667 | [S] |
| | | | | | | in archaea | | |
| 0625 | 583941 | 584888 | + | 315 | Mch | Methenyltetrahydromethanopterin | COG3252 | [H] |
| | | | | | | cyclohydrolase | | |
| 0626 | 588697 | 589611 | + | 304 | | Uncharacterized protein specific for | | |
| | | | | | | M. kandleri, MK-7 family | | |
| 0627 | 589834 | 590232 | − | 132 | FlpD_2 | Coenzyme F420-reducing | COG1908 | [C] |
| | | | | | | hydrogenase, delta subunit | | |
| 0628 | 590310 | 591596 | + | 428 | AroA | 5-enolpyruvylshikimate-3-phosphate | COG0128 | [E] |
| | | | | | | synthase | | |
| 0629 | 591588 | 592031 | − | 147 | | Predicted hydrocarbon binding | COG1719 | [R] |
| | | | | | | protein (contains V4R domain) | | |
| 0630 | 592104 | 592511 | − | 135 | | Predicted hydrocarbon binding | COG1719 | [R] |
| | | | | | | protein (contains V4R domain) | | |
| 0631 | 592609 | 593769 | + | 386 | AroC | Chorismate synthase | COG0082 | [E] |
| 0632 | 593764 | 594639 | − | 291 | | Predicted hydrocarbon binding | COG1719 | [R] |
| | | | | | | protein (contains V4R domain) | | |
| 0633 | 594757 | 595908 | + | 383 | | Aspartate aminotransferase | COG0075 | [E] |
| 0634 | 595894 | 596667 | − | 257 | | Uncharacterized protein conserved | COG4053 | [S] |
| | | | | | | in archaea | | |
| 0635 | 596667 | 597305 | + | 212 | SUA5 | Translation factor (SUA5) | COG0009 | [J] |
| 0636 | 597298 | 597756 | + | 152 | | Uncharacterized protein conserved | COG4090 | [S] |
| | | | | | | in archaea | | |
| 0637 | 597753 | 598430 | + | 225 | | SAM-dependent methyltransferase | COG0500 | [QR] |
| 0638 | 598427 | 598936 | + | 169 | | Uncharacterized conserved protein | COG2042 | [S] |
| 0639 | 598998 | 600539 | − | 513 | | Predicted membrane protein | | |
| 0640 | 600529 | 601014 | − | 161 | | Uncharacterized protein | | |
| 0641 | 601207 | 601356 | + | 49 | RPL40A | Ribosomal protein L40E | COG1552 | [J] |
| 0642 | 601360 | 602079 | + | 239 | | Predicted phosphate-binding | COG1646 | [R] |
| | | | | | | enzyme of the TIM-barrel fold | | |
| 0643 | 602066 | 602473 | − | 135 | | Uncharacterized protein | | |
| 0644 | 602534 | 603211 | + | 225 | | Predicted ATPase of the PP-loop | COG2102 | [R] |
| | | | | | | superfamily | | |
| 0645 | 603358 | 604410 | + | 350 | | Uncharacterized protein | | |
| 0646 | 604733 | 604954 | − | 73 | | Uncharacterized protein | | |
| 0647 | 605491 | 606189 | + | 232 | | Uncharacterized protein specific for | | |
| | | | | | | M. kandleri, MK-1 family | | |
| 0648 | 606223 | 608511 | − | 762 | HypF | Hydrogenase maturation factor | COG0068 | [O] |
| 0649 | 608508 | 609632 | − | 374 | | Uncharacterized protein | | |
| 0650 | 609636 | 610853 | − | 405 | | Fe—S oxidoreductase, related to | COG1625 | [C] |
| | | | | | | NifB/MoaA family | | |
| 0651 | 611026 | 612360 | + | 444 | McrB | Methyl coenzyme M reductase, beta | COG4054 | [H] |
| | | | | | | subunit | | |
| 0652 | 612470 | 612991 | + | 173 | McrD | Methyl coenzyme M reductase, | COG4055 | [H] |
| | | | | | | subunit D | | |
| 0653 | 613000 | 613608 | + | 202 | McrC | Methyl coenzyme M reductase, | COG4056 | [H] |
| | | | | | | subunit C | | |
| 0654 | 613750 | 614523 | + | 257 | McrG | Methyl coenzyme M reductase, | COG4057 | [H] |
| | | | | | | gamma subunit | | |
| 0655 | 614620 | 616281 | + | 553 | McrA | Methyl coenzyme M reductase, | COG4058 | [H] |
| | | | | | | alpha subunit | | |
| 0656 | 616411 | 617307 | + | 298 | MtrE | N5-methyl- | COG4059 | [H] |
| | | | | | | tetrahydromethanopterin:coenzyme | | |
| | | | | | | M methyltransferase, subunit E | | |
| 0657 | 617423 | 618100 | + | 225 | MtrD | N5-methyl- | COG4060 | [H] |
| | | | | | | tetrahydromethanopterin:coenzyme | | |
| | | | | | | M methyltransferase, subunit D | | |
| 0658 | 618120 | 618932 | + | 270 | MtrC | N5-methyl- | COG4061 | [H] |
| | | | | | | tetrahydromethanopterin:coenzyme | | |
| | | | | | | M methyltransferase, subunit C | | |
| 0659 | 618946 | 619284 | + | 112 | MtrB | N5-methyl- | COG4062 | [H] |
| | | | | | | tetrahydromethanopterin:coenzyme | | |
| | | | | | | M methyltransferase, subunit B | | |
| 0660 | 619299 | 620057 | + | 252 | MtrA | N5-methyl- | COG4063 | [H] |
| | | | | | | tetrahydromethanopterin:coenzyme | | |
| | | | | | | M methyltransferase, subunit A | | |
| 0661 | 620071 | 620295 | + | 74 | MtrG | N5-methyl- | COG4064 | [H] |
| | | | | | | tetrahydromethanopterin:coenzyme | | |
| | | | | | | M methyltransferase, subunit G | | |
| 0662 | 620318 | 621286 | + | 322 | MtrH | N5-methyl- | COG1962 | [H] |
| | | | | | | tetrahydromethanopterin:coenzyme | | |
| | | | | | | M methyltransferase, subunit H | | |
| 0663 | 621086 | 622561 | − | 491 | | Predicted protein of the CobN/Mg- | COG1429 | [H] |
| | | | | | | chelatase family, a fragment | | |
| 0664 | 622607 | 624328 | + | 573 | | Predicted protein of the CobN/Mg- | COG1429 | [H] |
| | | | | | | chelatase family, a fragment | | |
| 0665 | 624364 | 625800 | + | 478 | | Uncharacterized protein conserved | COG4065 | [S] |
| | | | | | | in archaea | | |
| 0666 | 625919 | 626347 | + | 142 | | Uncharacterized protein conserved | COG4066 | [S] |
| | | | | | | in archaea | | |
| 0667 | 626344 | 627258 | + | 304 | MetE | Methionine synthase II (cobalamin- | COG0620 | [E] |
| | | | | | | independent) | | |
| 0668 | 627325 | 627636 | + | 103 | | Uncharacterized protein conserved | | |
| | | | | | | in archaea | | |
| 0669 | 627780 | 628319 | − | 179 | | Membrane-associated phospholipid | COG0671 | [I] |
| | | | | | | phosphatase | | |
| 0670 | 628363 | 628776 | − | 137 | | Predicted NADH-flavin reductase | COG2510 | [S] |
| 0671 | 628773 | 629018 | − | 81 | | Uncharacterized protein | | |
| 0672 | 629019 | 630314 | − | 431 | | Pyridoxal-phosphate-dependent | COG0076 | [E] |
| | | | | | | enzyme related to glutamate | | |
| | | | | | | decarboxylase | | |
| 0673 | 630694 | 631617 | + | 307 | | tRNA/rRNA cytosine-C5-methylase | COG0144 | [J] |
| 0674 | 631691 | 632797 | + | 368 | | RIO1-like serine/threonine protein | COG0478 | [T] |
| | | | | | | kinase fused to an N-terminal DNA- | | |
| | | | | | | binding HTH domain | | |
| 0675 | 632724 | 633431 | + | 235 | | NCAIR mutase | COG1691 | [R] |
| 0676 | 633524 | 634726 | + | 400 | | Uncharacterized conserved protein | COG0585 | [S] |
| 0677 | 634723 | 634887 | − | 54 | | Zn-ribbon-containing protein | | |
| 0678 | 634980 | 635999 | + | 339 | TrpD | Anthranilate | COG0547 | [E] |
| | | | | | | phosphoribosyltransferase | | |
| 0679 | 636060 | 639833 | − | 1257 | FusA | Translation elongation and release | COG0480 & | [J][L] |
| | | | | | | factor (GTPase), contains an intein | COG1372 | |
| 0680 | 639848 | 640441 | − | 197 | RpsG | Ribosomal protein S7 | COG0049 | [J] |
| 0681 | 640545 | 640988 | − | 147 | RpsL | Ribosomal protein S12 | COG0048 | [J] |
| 0682 | 641007 | 641435 | − | 142 | NusA_1 | Transcription elongation factor NusA | COG0195 | [K] |
| 0683 | 641451 | 641780 | − | 109 | RPL30 | Ribosomal protein L30E | COG1911 | [J] |
| 0684 | 642269 | 643558 | − | 429 | RpoC_1 | DNA-directed RNA polymerase | COG0086 | [K] |
| | | | | | | largest subunit, the N-terminal part | | |
| 0685 | 643555 | 646416 | − | 953 | RpoC_2 | DNA-directed RNA polymerase | COG0086 | [K] |
| | | | | | | largest subunit, the C-terminal part | | |
| 0686 | 646413 | 648335 | − | 640 | RpoB_1 | DNA-directed RNA polymerase | COG0085 | [K] |
| | | | | | | second-largest subunit, the N- | | |
| | | | | | | terminal part | | |
| 0687 | 648385 | 649962 | − | 525 | RpoB_2 | DNA-directed RNA polymerase | COG0085 | [K] |
| | | | | | | second-largest subunit, the N- | | |
| | | | | | | terminal part | | |
| 0688 | 649995 | 650273 | − | 92 | RPB5 | DNA-directed RNA polymerase | COG2012 | [K] |
| | | | | | | subunit H | | |
| 0689 | 650240 | 650781 | − | 180 | | Ferredoxin | COG1145 | [C] |
| 0690 | 650789 | 653419 | − | 876 | SbcC | SMC1-family ATPase involved in | COG0419 | [L] |
| | | | | | | DNA repair | | |
| 0691 | 653427 | 654782 | − | 451 | SbcD | DNA repair exonuclease of the | COG0420 | [L] |
| | | | | | | SbcD/Mre11-family | | |
| 0692 | 654785 | 656368 | − | 527 | | Predicted P-loop ATPase | COG0433 | [R] |
| 0693 | 656349 | 657518 | − | 389 | | Uncharacterized protein conserved | | |
| | | | | | | in archaea | | |
| 0694 | 657749 | 658219 | − | 156 | | Uncharacterized protein | | |
| 0695 | 658227 | 658802 | − | 191 | | Uncharacterized protein | | |
| 0696 | 658768 | 659217 | − | 149 | | Uncharacterized conserved protein | COG1991 | [S] |
| 0697 | 659236 | 661821 | + | 861 | | Uncharacterized protein | | |
| 0698 | 661961 | 663658 | − | 565 | | Uncharacterized secreted protein | | |
| 0699 | 663655 | 664569 | − | 304 | | Uncharacterized secreted protein | | |
| 0700 | 664566 | 664736 | − | 56 | | Uncharacterized secreted protein | | |
| 0701 | 664747 | 664935 | − | 62 | | Predicted secreted protein specific | | |
| | | | | | | for M. kandleri, MK-18 family | | |
| 0702 | 664932 | 665126 | − | 64 | | Predicted secreted protein specific | | |
| | | | | | | for M. kandleri, MK-19 family | | |
| 0703 | 665111 | 666085 | − | 324 | PppA | Type II secretory pathway, prepilin | COG1989 | [NOU] |
| | | | | | | signal peptidase PulO and related | | |
| | | | | | | peptidases | | |
| 0704 | 666091 | 667089 | − | 332 | | Uncharacterized protein | | |
| 0705 | 668048 | 669025 | − | 325 | | Flp pilus assembly protein TadC | COG2064 | [NU] |
| 0706 | 669056 | 670144 | − | 362 | | Flp pilus assembly protein TadC | COG2064 | [NU] |
| 0707 | 670334 | 672142 | − | 602 | | Flp pilus assembly protein, ATPase | COG4962 | [U] |
| | | | | | | CpaF | | |
| 0708 | 672151 | 673908 | − | 585 | | Predicted AAA+ class ATPase with | COG0606 | [O] |
| | | | | | | chaperone activity | | |
| 0709 | 673914 | 674513 | − | 199 | RsmC | 16S RNA G1207 methylase RsmC | COG2813 | [J] |
| 0710 | 675105 | 676400 | − | 431 | AsnS | Aspartyl/asparaginyl-tRNA | COG0017 | [J] |
| | | | | | | synthetases | | |
| 0711 | 676444 | 677739 | − | 431 | HisD | Histidinol dehydrogenase | COG0141 | [E] |
| 0712 | 677717 | 678481 | − | 254 | | Uncharacterized protein conserved | COG1701 | [S] |
| | | | | | | in archaea | | |
| 0713 | 678478 | 679608 | − | 376 | Dfp | Phosphopantothenoylcysteine | COG0452 | [H] |
| | | | | | | synthetase/decarboxylase | | |
| 0714 | 679601 | 680143 | − | 180 | NusA_2 | Transcription elongation factor NusA | COG0195 | [K] |
| 0715 | 680294 | 680575 | + | 93 | Ssh10b_1 | Archaea-specific DNA-binding | COG1581 | [K] |
| | | | | | | protein | | |
| 0716 | 680541 | 682988 | − | 815 | | Uncharacterized protein specific for | | |
| | | | | | | M. kandleri, MK-40 family | | |
| 0717 | 682947 | 685229 | + | 760 | CdhA_1 | CO dehydrogenase/acetyl-CoA | COG1152 | [C] |
| | | | | | | synthase alpha subunit | | |
| 0718 | 685235 | 685714 | + | 159 | CdhB | CO dehydrogenase/acetyl-CoA | COG1880 | [C] |
| | | | | | | synthase epsilon subunit | | |
| 0719 | 685725 | 687623 | + | 632 | CdhA_1 | CO dehydrogenase/acetyl-CoA | COG1152 | [C] |
| | | | | | | synthase alpha subunit | | |
| 0720 | 687632 | 689035 | + | 467 | CdhC | CO dehydrogenase/acetyl-CoA | COG1614 | [C] |
| | | | | | | synthase beta subunit | | |
| 0721 | 689032 | 689805 | + | 257 | CooC_1 | CO dehydrogenase maturation factor | COG3640 | [D] |
| 0722 | 689798 | 691000 | + | 400 | CdhD | CO dehydrogenase/acetyl-CoA | COG2069 | [C] |
| | | | | | | synthase delta subunit (corrinoid Fe— | | |
| | | | | | | S protein) | | |
| 0723 | 691014 | 692402 | + | 462 | CdhE | CO dehydrogenase/acetyl-CoA | COG1456 | [C] |
| | | | | | | synthase gamma subunit (corrinoid | | |
| | | | | | | Fe—S protein) | | |
| 0724 | 692457 | 693386 | + | 309 | | Nucleoside-diphosphate-sugar | COG0451 | [MG] |
| | | | | | | epimerase | | |
| 0725 | 693426 | 693929 | + | 167 | HycB | Fe—S-cluster-containing hydrogenase | COG1142 | [C] |
| | | | | | | component | | |
| 0726 | 693907 | 694650 | + | 247 | CooC_2 | CO dehydrogenase maturation factor | COG3640 | [D] |
| 0727 | 694590 | 694850 | + | 86 | | Ferredoxin | COG1146 | [C] |
| 0728 | 694843 | 695961 | + | 372 | PorA_2 | Pyruvate: ferredoxin oxidoreductase, | COG0674 | [C] |
| | | | | | | alpha subunit | | |
| 0729 | 695958 | 696773 | + | 271 | PorB_2 | Pyruvate: ferredoxin oxidoreductase, | COG1013 | [C] |
| | | | | | | beta subunit | | |
| 0730 | 696757 | 697287 | + | 176 | PorG_2 | Pyruvate: ferredoxin oxidoreductase, | COG1014 | [C] |
| | | | | | | gamma subunit | | |
| 0731 | 697284 | 698363 | + | 359 | SucC | Succinyl-CoA synthetase beta | COG0045 | [C] |
| | | | | | | subunit | | |
| 0732 | 698367 | 699230 | + | 287 | SucD | Succinyl-CoA synthetase alpha | COG0074 | [C] |
| | | | | | | subunit | | |
| 0733 | 699231 | 700091 | + | 286 | | Predicted archaea-specific kinase of | COG1829 | [R] |
| | | | | | | the sugar kinase superfamily | | |
| 0734 | 700084 | 700260 | + | 58 | | Predicted RNA-binding protein | COG1532 | [R] |
| 0735 | 700349 | 701005 | − | 218 | PyrF | Orotidine-5′-phosphate | COG0284 | [F] |
| | | | | | | decarboxylase | | |
| 0736 | 700981 | 701478 | − | 165 | | Uncharacterized protein | | |
| 0737 | 701479 | 702372 | − | 297 | DYS1 | Deoxyhypusine synthase | COG1899 | [O] |
| 0738 | 702369 | 703142 | − | 257 | SpeB | Agmatinase | COG0010 | [E] |
| 0739 | 703117 | 703527 | − | 136 | Efp | Translation initiation factor elF-5A | COG0231 | [J] |
| 0740 | 703599 | 704051 | + | 150 | SpeA | Pyruvoyl-dependent arginine | COG1945 | [S] |
| | | | | | | decarboxylase (PvlArgDC) | | |
| | | | | | | [Contains: Pyruvoyl-dependent | | |
| | | | | | | arginine decarboxylase beta subunit; | | |
| | | | | | | Pyruvoyl-dependent arginine | | |
| | | | | | | decarboxylase alpha subunit] | | |
| 0741 | 704058 | 705071 | + | 337 | SuhB | Archaea-specific fructose-1,6- | COG0483 & | [G] |
| | | | | | | bisphosphatase fused to predicted | COG1694 | [R] |
| | | | | | | pyrophosphatase of the PRA-PH | | |
| | | | | | | family | | |
| 0742 | 705044 | 705874 | + | 276 | | Predicted sugar kinase | COG0061 | [G] |
| 0743 | 705968 | 706243 | − | 91 | HHT1_2 | Histones H3/H4 | COG2036 | [L] |
| 0744 | 706262 | 706693 | + | 143 | | Predicted nuclei-acid-binding protein, | COG1439 | [R] |
| | | | | | | consists of a PIN domain and a Zn- | | |
| | | | | | | ribbon | | |
| 0745 | 706675 | 707529 | + | 284 | | Predicted metalloprotease fused to | COG4067 & | [O] |
| | | | | | | aspartyl protease | COG4740 | [R] |
| 0746 | 707526 | 708443 | + | 305 | HemC | Porphobilinogen deaminase | COG0181 | [H] |
| 0747 | 708436 | 709227 | + | 263 | DPH5 | Methyltransferase involved in | COG1798 | [J] |
| | | | | | | diphthamide biosynthesis | | |
| 0748 | 709231 | 709587 | + | 118 | | Uncharacterized protein conserved | COG1885 | [S] |
| | | | | | | in archaea | | |
| 0749 | 709592 | 710701 | − | 369 | | Uncharacterized protein conserved | | |
| | | | | | | in archaea, possible membrane | | |
| | | | | | | metallohydrolase | | |
| 0750 | 710703 | 711950 | − | 415 | | Uncharacterized protein conserved | | |
| | | | | | | in archaea, Zn-ribbon domain | | |
| | | | | | | containing | | |
| 0751 | 711973 | 712422 | − | 149 | | Uncharacterized protein conserved | | |
| | | | | | | in archaea | | |
| 0752 | 712425 | 713867 | − | 480 | MurE_1 | UDP-N-acetylmuramyl tripeptide | COG0769 | [M] |
| | | | | | | synthase | | |
| 0753 | 713877 | 714947 | − | 356 | MraY | UDP-N-acetylmuramyl pentapeptide | COG0472 | [M] |
| | | | | | | phosphotransferase | | |
| 0754 | 714964 | 716103 | − | 379 | CarB_1 | Carbamoylphosphate synthase large | COG0458 | [EF] |
| | | | | | | subunit | | |
| 0755 | 716100 | 717638 | − | 512 | MurC | UDP-N-acetylmuramate-alanine | COG0773 | [M] |
| | | | | | | ligase | | |
| 0756 | 717691 | 718695 | − | 334 | | Predicted ATPase of the PP-loop | COG0037 | [D] |
| | | | | | | superfamily implicated in cell cycle | | |
| | | | | | | control | | |
| 0757 | 718688 | 720403 | − | 571 | GlnS | Glutamyl-tRNA synthetase | COG0008 | [J] |
| 0758 | 720849 | 722627 | − | 592 | ArgS | Arginyl-tRNA synthetase | COG0018 | [J] |
| 0759 | 722643 | 723872 | − | 409 | eRF1 | Peptide chain release factor eRF1 | COG1503 | [J] |
| 0760 | 723901 | 724572 | + | 223 | PyrH | Uridylate kinase | COG0528 | [F] |
| 0761 | 724579 | 724770 | + | 63 | | Zn-ribbon containing protein | COG4068 | [S] |
| 0762 | 724738 | 725484 | − | 248 | | Predicted RNA methylase | COG4076 | [R] |
| 0763 | 725481 | 726020 | − | 179 | | Uncharacterized conserved protein | COG1432 | [S] |
| 0764 | 726042 | 726800 | − | 252 | | Uncharacterized protein | | |
| 0765 | 726742 | 727086 | − | 114 | | Uncharacterized protein | | |
| 0766 | 727083 | 728198 | − | 371 | PhoH | Phosphate starvation-inducible | COG1702 | [T] |
| | | | | | | protein PhoH, predicted ATPase | | |
| 0767 | 728211 | 729026 | − | 271 | UppS | Undecaprenyl pyrophosphate | COG0020 | [I] |
| | | | | | | synthase | | |
| 0768 | 729066 | 729563 | + | 165 | | Predicted phosphoesterase | COG0622 | [R] |
| 0769 | 729717 | 730787 | + | 356 | | tRNA/rRNA cytosine-C5-methylase | COG0144 | [J] |
| 0770 | 730816 | 731811 | + | 331 | | Predicted integral membrane protein | COG0392 | [S] |
| 0771 | 732207 | 734036 | + | 609 | | Predicted acyltransferase | COG4801 | [R] |
| 0772 | 734033 | 734974 | − | 313 | | Carbonic | COG0663 | [R] |
| | | | | | | anhydrases/acetyltransferase | | |
| | | | | | | homolog, isoleucine patch | | |
| | | | | | | superfamily | | |
| 0773 | 735042 | 735533 | − | 163 | | Uncharacterized protein conserved | COG4072 | [S] |
| | | | | | | in archaea | | |
| 0774 | 735536 | 736510 | − | 324 | IspA | Geranylgeranyl pyrophosphate | COG0142 | [H] |
| | | | | | | synthase | | |
| 0775 | 736523 | 737884 | − | 453 | | Predicted hydrolase of the metallo- | COG0595 | [R] |
| | | | | | | beta-lactamase superfamily | | |
| 0776 | 737872 | 738996 | − | 374 | LldD | L-lactate dehydrogenase (FMN- | COG1304 | [C] |
| | | | | | | dependent) | | |
| 0777 | 738974 | 739693 | − | 239 | | Predicted archaeal kinase | COG1608 | [R] |
| 0778 | 739816 | 740862 | + | 348 | ThiI_1 | Thiamine biosynthesis ATP | COG0301 | [H] |
| | | | | | | pyrophosphatase | | |
| 0779 | 740929 | 741837 | + | 302 | | FOG: CBS domain | COG0517 | [R] |
| 0780 | 741887 | 743083 | + | 398 | | Uncharacterized conserved protein | COG3287 | [S] |
| 0781 | 743138 | 743650 | + | 170 | LeuD_1 | 3-isopropylmalate dehydratase small | COG0066 | [E] |
| | | | | | | subunit | | |
| 0782 | 743656 | 744663 | + | 335 | LeuB_1 | Isocitrate/isopropylmalate | COG0473 | [E] |
| | | | | | | dehydrogenase | | |
| 0783 | 744973 | 745683 | + | 236 | | Uncharacterized protein | | |
| 0784 | 745708 | 746904 | + | 398 | TrpB | Tryptophan synthase beta chain | COG0133 | [E] |
| 0785 | 746905 | 747300 | − | 131 | | Predicted hydrocarbon binding | COG1719 | [R] |
| | | | | | | protein (contains V4R domain) | | |
| 0786 | 747316 | 747681 | + | 121 | | Uncharacterized protein conserved | COG2098 | [S] |
| | | | | | | in archaea | | |
| 0787 | 747678 | 748961 | + | 427 | | Protein containing | COG0615 & | [MI] |
| | | | | | | cytidylyltransferase domain and | COG1323 | [R] |
| | | | | | | predicted nucleotidyltransferase | | |
| | | | | | | (HIG superfamily) domain | | |
| 0788 | 748958 | 750166 | + | 402 | | Fe—S oxidoreductase family protein | COG1032 | [C] |
| 0789 | 750112 | 750972 | + | 286 | | Possible metal-dependent hydrolase | | |
| 0790 | 750903 | 751583 | − | 226 | PurL_1 | Phosphoribosylformylglycinamidine | COG0047 | [F] |
| | | | | | | (FGAM) synthase, glutamine | | |
| | | | | | | amidotransferase subunit | | |
| 0791 | 751653 | 751907 | − | 84 | PurS | Phosphoribosylformylglycinamidine | COG1828 | [F] |
| | | | | | | (FGAM) synthase, PurS subunit | | |
| 0792 | 751904 | 752647 | − | 247 | PurC | Phosphoribosylaminoimidazolesuccinocarboxamide | COG0152 | [F] |
| | | | | | | (SAICAR) synthase | | |
| 0793 | 752727 | 753977 | + | 416 | | Uncharacterized conserved protein | COG3287 | [S] |
| 0794 | 753993 | 755180 | + | 395 | | Uncharacterized protein conserved | COG4069 | [S] |
| | | | | | | in archaea | | |
| 0795 | 755237 | 756220 | + | 327 | | Selenophosphate synthetase | COG2144 | [R] |
| 0796 | 756217 | 757752 | + | 511 | | Predicted peptidyl-prolyl cis-trans | COG4070 | [O] |
| | | | | | | isomerase (rotamase), cyclophilin | | |
| | | | | | | family | | |
| 0797 | 757749 | 759056 | + | 435 | | Fe—S oxidoreductase | COG1032 | [C] |
| 0798 | 759053 | 760315 | + | 420 | TyrA_2 | Prephenate dehydrogenase | COG0287 | [E] |
| 0799 | 760363 | 762369 | − | 668 | | Coenzyme F420-reducing | COG1035 & | [C][C] |
| | | | | | | hydrogenase, beta subunit fused to | COG2221 | |
| | | | | | | oxidoreductase related to Nitrite | | |
| | | | | | | reductase and Dissimilatory sulfite | | |
| | | | | | | reductase (desulfoviridin), alpha and | | |
| | | | | | | beta subunits | | |
| 0800 | 762431 | 762814 | + | 127 | | Predicted transcriptional regulator | COG3355 | [K] |
| | | | | | | containing a wHTH DNA-binding | | |
| | | | | | | domain | | |
| 0801 | 762811 | 763422 | + | 203 | | Oxidoreductase related to Nitrite | COG2221 | [C] |
| | | | | | | reductase and Dissimilatory sulfite | | |
| | | | | | | reductase (desulfoviridin), alpha and | | |
| | | | | | | beta subunits | | |
| 0802 | 763376 | 764641 | − | 421 | | Uncharacterized protein | | |
| 0803 | 764701 | 765237 | + | 178 | | SpoU-like RNA methylase | COG1303 | [S] |
| 0804 | 765234 | 765932 | + | 232 | ApaH | Diadenosine tetraphosphatase | COG0639 | [T] |
| 0805 | 765929 | 766717 | − | 262 | | Uncharacterized protein | | |
| 0806 | 766921 | 768012 | − | 363 | | Possible Zn-dependent | | |
| | | | | | | metallohydrolase | | |
| 0807 | 768031 | 768816 | + | 261 | | Uncharacterized conserved protein | COG1912 | [S] |
| 0808 | 768856 | 770355 | − | 499 | | Short chain dehydrogenase fused to | COG0062 & | [S][G] |
| | | | | | | sugar kinase | COG0063 | |
| 0809 | 770475 | 771254 | + | 259 | | ABC-type antimicrobial peptide | COG1136 | [V] |
| | | | | | | transport system, ATPase | | |
| | | | | | | component | | |
| 0810 | 771251 | 771961 | + | 236 | HypB_1 | Ni2+-binding GTPase involved in | COG0378 | [OK] |
| | | | | | | regulation of expression and | | |
| | | | | | | maturation of urease and | | |
| | | | | | | hydrogenase | | |
| 0811 | 771930 | 772610 | + | 226 | | Predicted Fe—S protein | COG2000 | [R] |
| 0812 | 772762 | 773676 | − | 304 | | Uncharacterized conserved protein | COG1578 | [S] |
| 0813 | 773691 | 774935 | − | 414 | | Predicted membrane-associated Zn- | COG0750 | [M] |
| | | | | | | dependent protease | | |
| 0814 | 774937 | 775368 | − | 143 | | Uncharacterized conserved protein | COG0432 | [S] |
| 0815 | 775372 | 776106 | + | 244 | MscS | Small-conductance | COG0668 | [M] |
| | | | | | | mechanosensitive channel | | |
| 0816 | 776227 | 777129 | + | 300 | Ftr_2 | Formylmethanofuran:tetrahydromethanopterin | COG2037 | [C] |
| | | | | | | formyltransferase | | |
| 0817 | 777133 | 778026 | + | 297 | | Sugar kinase of the ribokinase family | COG0524 | [G] |
| 0818 | 778042 | 778800 | − | 252 | | Organic-radical-activating enzyme | COG0602 | [O] |
| 0819 | 778761 | 779243 | − | 160 | | 6-pyruvoyl-tetrahydropterin synthase | COG0720 | [H] |
| 0820 | 779435 | 781207 | + | 590 | PheT | Phenylalanyl-tRNA synthetase beta | COG0072 | [J] |
| | | | | | | subunit | | |
| 0821 | 781211 | 782434 | + | 407 | FtsZ_1 | FtsZ GTPase involved in cell division | COG0206 | [D] |
| 0822 | 782450 | 782635 | + | 61 | Sss1 | Protein translocase subunit Sss1 | COG2443 | [U] |
| 0823 | 782651 | 783142 | + | 163 | NusG | Transcription antiterminator NusG | COG0250 | [K] |
| 0824 | 783170 | 783670 | + | 166 | RplK | Ribosomal protein L11 | COG0080 | [J] |
| 0825 | 783684 | 784328 | + | 214 | RplA | Ribosomal protein L1 | COG0081 | [J] |
| 0826 | 784328 | 785416 | + | 362 | RplJ | Ribosomal protein L10 | COG0244 | [J] |
| 0827 | 785439 | 785981 | + | 180 | | Predicted nucleotide kinase | COG1618 | [J] |
| 0828 | 785987 | 787657 | + | 556 | SdhA | Succinate dehydrogenase/fumarate | COG1053 | [C] |
| | | | | | | reductase, flavoprotein subunit | | |
| 0829 | 787632 | 789431 | − | 599 | AdeC | Adenine deaminase | COG1001 | [F] |
| 0830 | 789454 | 790515 | − | 353 | | Uncharacterized protein specific for | | |
| | | | | | | M. kandleri, MK-25 family | | |
| 0831 | 790663 | 791670 | − | 335 | | Uncharacterized membrane protein | | |
| | | | | | | specific for M. kandleri, MK-24 family | | |
| 0832 | 791741 | 792721 | − | 326 | IlvC | Ketol-acid reductoisomerase | COG0059 | [EH] |
| 0833 | 792735 | 793019 | − | 94 | RPL14A | Ribosomal protein L14E | COG2163 | [J] |
| 0834 | 793046 | 794548 | + | 500 | | Uncharacterized membrane protein | | |
| 0835 | 794560 | 797016 | + | 818 | | Archaea-specific Superfamily II | COG1202 | [R] |
| | | | | | | helicase | | |
| 0836 | 797005 | 798327 | − | 440 | | Uncharacterized protein | | |
| 0837 | 798324 | 798665 | − | 113 | | Uncharacterized protein | | |
| 0838 | 798710 | 799576 | + | 288 | | Uncharacterized protein conserved | COG4071 | [S] |
| | | | | | | in archaea | | |
| 0839 | 799566 | 800123 | − | 185 | SPT15 | Transcription initiation factor TFIID | COG2101 | [K] |
| | | | | | | (TATA-binding protein) | | |
| 0840 | 800146 | 801222 | − | 358 | | Predicted molecular chaperone | COG2377 | [O] |
| | | | | | | distantly related to HSP70-fold | | |
| | | | | | | metalloproteases | | |
| 0841 | 801199 | 801678 | + | 159 | RplV | Ribosomal protein L22 | COG0091 | [J] |
| 0842 | 801692 | 802375 | + | 227 | RpsC | Ribosomal protein S3 | COG0092 | [J] |
| 0843 | 802379 | 802612 | + | 77 | RpmC | Ribosomal protein L29 | COG0255 | [J] |
| 0844 | 802632 | 802952 | + | 106 | SUI1 | Translation initiation factor (SUI1) | COG0023 | [J] |
| 0845 | 802945 | 803634 | − | 229 | | SAM-dependent methyltransferase | COG0500 | [QR] |
| 0846 | 803550 | 803876 | + | 108 | POP4_1 | RNAse P subunit P29 | COG1588 | [J] |
| 0847 | 803850 | 804587 | − | 245 | | Membrane protease subunit, | COG0330 | [O] |
| | | | | | | stomatin/prohibitin homolog | | |
| 0848 | 804584 | 805012 | − | 142 | | Membrane protein implicated in | COG1585 | [OU] |
| | | | | | | regulation of membrane protease | | |
| | | | | | | activity | | |
| 0849 | 805062 | 806366 | + | 434 | Lpd | Dihydrolipoamide dehydrogenase | COG1249 | [C] |
| 0850 | 806368 | 808374 | − | 668 | MetG | Methionyl-tRNA synthetase | COG0143 & | [J][R] |
| | | | | | | | COG0073 | |
| 0851 | 808381 | 809715 | − | 444 | | Uncharacterized membrane protein | | |
| | | | | | | specific for M. kandleri, MK-15 family | | |
| 0852 | 809802 | 810416 | − | 204 | | Uncharacterized protein | | |
| 0853 | 810419 | 811066 | − | 215 | | Uncharacterized membrane protein | | |
| | | | | | | specific for M. kandleri, MK-15 family | | |
| 0854 | 811293 | 812264 | − | 323 | | Predicted UDP-N-acetylglucosamine | | |
| | | | | | | 2-epimerase of the MurG family | | |
| 0855 | 812269 | 812874 | − | 201 | HisB | Imidazoleglycerol-phosphate | COG0131 | [E] |
| | | | | | | dehydratase | | |
| 0856 | 812939 | 813283 | + | 114 | | Predicted RNA-binding protein | COG4085 | [R] |
| | | | | | | containing a TRAM domain | | |
| 0857 | 813255 | 814070 | + | 271 | | Uncharacterized protein | | |
| 0858 | 814061 | 814984 | − | 307 | SUA7_2 | Transcription initiation factor IIB | COG1405 | [K] |
| 0859 | 815000 | 815284 | − | 94 | GAR1 | RNA-binding protein involved in | COG3277 | [J] |
| | | | | | | rRNA processing | | |
| 0860 | 815362 | 815964 | − | 200 | | Ferredoxin | COG1146 | [C] |
| 0861 | 815970 | 816254 | + | 94 | | Uncharacterized protein | | |
| 0862 | 816285 | 817220 | + | 311 | PhoU | Phosphate uptake regulator | COG0704 | [P] |
| 0863 | 817232 | 817948 | + | 238 | FtsZ_2 | FtsZ GTPase involved in cell division | COG0206 | [D] |
| 0864 | 817961 | 818197 | + | 78 | | Predicted DNA-binding protein | | |
| 0865 | 818237 | 819400 | + | 387 | | Predicted kinase related to thiamine | COG1364 | [E] |
| | | | | | | pyrophosphokinase | | |
| 0866 | 819624 | 820862 | + | 412 | | Uncharacterized conserved protein | COG1915 | [S] |
| 0867 | 820834 | 821088 | − | 84 | | Uncharacterized protein conserved | COG4082 | |
| | | | | | | in archaea | | |
| 0868 | 821117 | 822100 | + | 327 | | 2-Phosphoglycerate kinase | COG2074 | [G] |
| 0869 | 822107 | 822523 | + | 138 | | CBS-domain-containing protein | COG0517 | [R] |
| 0870 | 822747 | 823631 | − | 294 | | Uncharacterized protein | | |
| 0871 | 823635 | 824180 | − | 181 | CyaB | Adenylate cyclase, class 2 | COG1437 | [F] |
| | | | | | | (thermophilic) | | |
| 0872 | 824222 | 825364 | − | 380 | EriC | Chloride channel protein EriC | COG0038 | [P] |
| 0873 | 825400 | 825711 | + | 103 | CpsB_1 | Mannose-6-phosphate isomerase | COG0662 | [G] |
| 0874 | 825979 | 826695 | + | 238 | | Acetyltransferase (the isoleucine | COG0110 | [R] |
| | | | | | | patch superfamily) | | |
| 0875 | 826703 | 827305 | + | 200 | | Uncharacterized protein | | |
| 0876 | 827312 | 828238 | + | 308 | CitG_2 | Triphosphoribosyl-dephospho-CoA | COG1767 | [H] |
| | | | | | | synthetase | | |
| 0877 | 828174 | 828677 | + | 167 | | Uncharacterized protein | | |
| 0878 | 828838 | 830148 | + | 436 | RPT1 | ATP-dependent 26S proteasome | COG1222 | [O] |
| | | | | | | regulatory subunit | | |
| 0879 | 830233 | 831030 | + | 265 | | Uncharacterized protein | | |
| 0880 | 830924 | 831646 | + | 240 | | Glycosyltransferase involved in cell | COG0463 | [M] |
| | | | | | | wall biogenesis | | |
| 0881 | 831689 | 833029 | + | 446 | | NAD(FAD)-dependent | COG0446 | [R] |
| | | | | | | dehydrogenase | | |
| 0882 | 833026 | 833541 | + | 171 | | Permease related to cation | COG1824 | [P] |
| | | | | | | transporters | | |
| 0883 | 833538 | 834059 | + | 173 | | Permease related to cation | COG1824 | [P] |
| | | | | | | transporters | | |
| 0884 | 834071 | 834661 | + | 196 | | Uncharacterized conserved protein | COG3273 | [S] |
| 0885 | 834663 | 834959 | + | 98 | | Predicted transcriptional regulator | COG3357 | [K] |
| | | | | | | consisting of an HTH domain fused | | |
| | | | | | | to a Zn-ribbon | | |
| 0886 | 834949 | 835605 | − | 218 | | Uncharacterized protein | | |
| 0887 | 835602 | 836366 | − | 254 | | Uncharacterized protein | | |
| 0888 | 836360 | 837130 | − | 256 | TruA | Pseudouridylate synthase (tRNA | COG0101 | [J] |
| | | | | | | psi55) | | |
| 0889 | 837127 | 838032 | − | 301 | | Predicted enzyme related to | COG2144 | [R] |
| | | | | | | selenophosphate synthetase | | |
| 0890 | 838029 | 839210 | − | 393 | | Predicted membrane protein | COG1784 | [S] |
| 0891 | 839229 | 839777 | + | 182 | | Predicted membrane protein | | |
| 0892 | 839829 | 841106 | − | 425 | | Nucleoside-diphosphate-sugar | COG1208 | [MJ] |
| | | | | | | pyrophosphorylase involved in | | |
| | | | | | | lipopolysaccharide | | |
| | | | | | | biosynthesis/translation initiation | | |
| | | | | | | factor elF2B subunit | | |
| 0893 | 841103 | 842461 | − | 452 | CpsG_1 | Phosphomannomutase | COG1109 | [G] |
| 0894 | 842475 | 843281 | + | 268 | | Predicted DNA-modification | COG1041 | [L] |
| | | | | | | methylase | | |
| 0895 | 843334 | 844707 | − | 457 | | Fe—S oxidoreductase similar to Mg- | COG1032 | [C] |
| | | | | | | protoporphyrin IX monomethyl ester | | |
| | | | | | | oxidative cyclase-related protein | | |
| | | | | | | and subunits of a Ni-chelatase for | | |
| | | | | | | the biosynthesis of the Ni-containing | | |
| | | | | | | coenzyme F430, which is essential | | |
| | | | | | | for the production of methane in | | |
| | | | | | | methanogens | | |
| 0896 | 844704 | 846110 | − | 468 | | Fe—S oxidoreductase fused to a | COG4001 & | [R][R] |
| | | | | | | metal-binding domain | COG0535 | |
| 0897 | 846128 | 847237 | − | 369 | ThiH_1 | Predicted enzyme related to | COG1060 | [HR] |
| | | | | | | thiamine biosynthesis enzyme ThiH | | |
| 0898 | 847218 | 848360 | − | 380 | ThiH_2 | Predicted enzyme related to | COG1060 | [HR] |
| | | | | | | thiamine biosynthesis enzyme ThiH | | |
| 0899 | 848389 | 851631 | + | 1080 | IleS | Isoleucyl-tRNA synthetase | COG0060 | [J] |
| 0900 | 851628 | 854384 | + | 918 | AlaS | Alanyl-tRNA synthetase | COG0013 | [J] |
| 0901 | 854758 | 856533 | − | 591 | NrdD | Oxygen-sensitive ribonucleoside- | COG1328 | [F] |
| | | | | | | triphosphate reductase | | |
| 0902 | 856681 | 858303 | − | 540 | | Uncharacterized protein | | |
| 0903 | 858399 | 858818 | + | 139 | | Ferredoxin | COG1145 | [C] |
| 0904 | 858815 | 859825 | + | 336 | | Predicted protease of the | COG0826 | [O] |
| | | | | | | collagenase family | | |
| 0905 | 859827 | 860189 | + | 120 | | Predicted metal-binding protein | | |
| 0906 | 860186 | 860890 | + | 234 | | Predicted protease of the | COG0826 | [O] |
| | | | | | | collagenase family | | |
| 0907 | 860862 | 862367 | − | 501 | | prdicted regulatory protein consisting | COG1900 & | [S][R] |
| | | | | | | of a uncharacterized conserved | COG0517 | |
| | | | | | | domain fused to a CBS domain | | |
| 0908 | 862342 | 863466 | − | 374 | Thil_2 | ATP pyrophosphatase involved in | COG0301 | [H] |
| | | | | | | thiamine biosynthesis | | |
| 0909 | 863512 | 864411 | + | 299 | | Uncharacterized conserved protein | COG2013 | [S] |
| 0910 | 864567 | 866477 | − | 636 | | Predicted membrane protein, MK-44 | | |
| | | | | | | family | | |
| 0911 | 866594 | 868288 | − | 564 | CarB_2 | Carbamoylphosphate synthase large | COG0458 | [EF] |
| | | | | | | subunit | | |
| 0912 | 868674 | 869447 | + | 257 | | Uncharacterized protein | | |
| 0913 | 869366 | 870883 | + | 505 | | Predicted membrane protein | | |
| 0914 | 870784 | 873003 | − | 739 | | Predicted membrane protein, MK-44 | | |
| | | | | | | family | | |
| 0915 | 872967 | 873524 | − | 185 | | Uncharacterized protein | | |
| 0916 | 873521 | 874090 | − | 189 | | Predicted membrane protein | | |
| 0917 | 874490 | 875560 | − | 356 | | Nucleoside-diphosphate-sugar | COG1208 | [MJ] |
| | | | | | | pyrophosphorylase involved in | | |
| | | | | | | lipopolysaccharide | | |
| | | | | | | biosynthesis/translation initiation | | |
| | | | | | | factor elF2B subunit | | |
| 0918 | 875582 | 876487 | − | 301 | AgaS | Predicted phosphosugar isomerase | COG2222 | [M] |
| 0919 | 876477 | 876932 | − | 151 | | Uncharacterized membrane protein | COG2246 | [S] |
| 0920 | 876957 | 878327 | + | 456 | CpsG_2 | Phosphomannomutase | COG1109 | [G] |
| 0921 | 878332 | 879759 | + | 475 | Top6B | DNA topoisomerase VI, subunit B | COG1389 | [L] |
| 0922 | 880054 | 881355 | + | 433 | | Uncharacterized protein specific for | | |
| | | | | | | M. kandleri, MK-19 family | | |
| 0923 | 881345 | 881530 | − | 61 | | Uncharacterized protein | | |
| 0924 | 882370 | 883326 | + | 318 | | Uncharacterized protein conserved | COG3366 | [S] |
| | | | | | | in archaea | | |
| 0925 | 883220 | 884197 | − | 325 | | Uncharacterized protein specific for | | |
| | | | | | | M. kandleri, MK-36 family | | |
| 0926 | 884275 | 885705 | + | 476 | MurE_1 | UDP-N-acetylmuramyl tripeptide | COG0769 | [M] |
| | | | | | | synthase | | |
| 0927 | 885706 | 886470 | + | 254 | | Uncharacterized protein conserved | | |
| | | | | | | in archaea | | |
| 0928 | 886477 | 887508 | + | 343 | PflX | Uncharacterized Fe—S protein PflX, | COG1313 | [R] |
| | | | | | | homolog of pyruvate formate lyase | | |
| | | | | | | activating protein | | |
| 0929 | 887505 | 888422 | − | 305 | | Coenzyme F420-reducing | COG1035 | [C] |
| | | | | | | hydrogenase, beta subunit | | |
| 0930 | 888425 | 889183 | − | 252 | | Coenzyme F420-reducing | COG1941 | [C] |
| | | | | | | hydrogenase, gamma subunit | | |
| 0931 | 889351 | 890601 | − | 416 | | Coenzyme F420-reducing | COG3259 | [C] |
| | | | | | | hydrogenase, alpha subunit | | |
| 0932 | 890735 | 892306 | + | 523 | | Fe—S oxidoreductase family protein | COG1032 | [C] |
| 0933 | 892458 | 893501 | − | 347 | | Predicted hydrolase of the metallo- | | |
| | | | | | | beta-lactamase superfamily, | | |
| | | | | | | contains a Zn-ribbon | | |
| 0934 | 893506 | 894342 | − | 278 | KsgA | Dimethyladenosine transferase | COG0030 | [J] |
| | | | | | | (rRNA methylase) | | |
| 0935 | 894329 | 895165 | − | 278 | | Predicted RNA-binding protein, | COG2131 & | [F][R] |
| | | | | | | contains THUMP domain | COG1818 | |
| 0936 | 895204 | 895467 | + | 87 | | CBS-domain-containing protein | COG0517 | [R] |
| 0937 | 895592 | 896863 | − | 423 | | Uncharacterized protein specific for | | |
| | | | | | | M. kandleri, MK-21 family | | |
| 0938 | 896885 | 897463 | − | 192 | Isf | Iron-sulfur flavoprotein similar to | COG0655 | [R] |
| | | | | | | Multimeric flavodoxin WrbA | | |
| 0939 | 897491 | 898330 | + | 279 | | Uncharacterized protein conserved | COG1650 | [S] |
| | | | | | | in archaea | | |
| 0940 | 898801 | 899631 | − | 276 | | Predicted SAM-dependent | COG2520 | [R] |
| | | | | | | methyltransferase | | |
| 0941 | 899633 | 900397 | − | 254 | | Phosphate acetyltransferase family | COG4002 | [R] |
| | | | | | | enzyme | | |
| 0942 | 901574 | 902758 | + | 394 | ArgG | Argininosuccinate synthase | COG0137 | [E] |
| 0943 | 902832 | 903947 | − | 371 | | ABC-type multidrug transport | COG0842 | [V] |
| | | | | | | system, permease subunit | | |
| 0944 | 903932 | 904639 | − | 235 | | ABC-type multidrug transport | COG1131 | [V] |
| | | | | | | system, ATPase subunit | | |
| 0945 | 904797 | 905420 | − | 207 | | Uncharacterized protein specific for | | |
| | | | | | | M. kandleri, MK-1 family | | |
| 0946 | 905879 | 906190 | + | 103 | | Uncharacterized membrane protein | | |
| | | | | | | specific for M. kandleri, MK-4 family | | |
| 0947 | 906696 | 908201 | + | 501 | | Uncharacterized secreted protein | | |
| | | | | | | specific for M. kandleri, contains | | |
| | | | | | | repeats, MK-5 family | | |
| 0948 | 908194 | 910293 | + | 699 | | Uncharacterized protein specific for | | |
| | | | | | | M. kandleri, MK-5 family | | |
| 0949 | 910269 | 911270 | + | 333 | | Predicted membrane protein | | |
| 0950 | 911951 | 912499 | − | 182 | | Predicted phosphatase homologous | COG2110 | [R] |
| | | | | | | to the C-terminal domain of histone | | |
| | | | | | | macroH2A1 | | |
| 0951 | 912898 | 913887 | + | 329 | ECM27_2 | Ca2+/Na+ antiporter | COG0530 | [P] |
| 0952 | 914028 | 915068 | + | 346 | | Pyruvate-formate lyase-activating | COG1180 | [O] |
| | | | | | | enzyme | | |
| 0953 | 915262 | 916077 | + | 271 | UbiA | 4-hydroxybenzoate | COG0382 | [H] |
| | | | | | | polyprenyltransferase | | |
| 0954 | 916066 | 917193 | − | 375 | | Archaeal fructose 1,6- | COG1980 | [G] |
| | | | | | | bisphosphatase | | |
| 0955 | 917240 | 917590 | − | 116 | EGD2 | Transcription factor homologous to | COG1308 | [K] |
| | | | | | | NACalpha-BTF3 | | |
| 0956 | 917639 | 918091 | − | 150 | | Prefoldin, molecular chaperone | COG1370 | [O] |
| | | | | | | implicated in de novo protein folding, | | |
| | | | | | | alpha subunit | | |
| 0957 | 918107 | 919444 | + | 445 | TldD | Predicted Zn-dependent protease of | COG0312 | [R] |
| | | | | | | TldD family | | |
| 0958 | 919444 | 920673 | + | 409 | PmbA | Inactivated homologs of predicted | COG0312 | [R] |
| | | | | | | Zn-dependent protease of TldD | | |
| | | | | | | family (PmbA subfamily protein) | | |
| 0959 | 920942 | 921322 | + | 126 | | Uncharacterized protein | | |
| 0960 | 921362 | 922747 | + | 461 | GatB | Asp-tRNAAsn/Glu-tRNAGln | COG0064 | [J] |
| | | | | | | amidotransferase B subunit (PET112 | | |
| | | | | | | homolog) | | |
| 0961 | 922744 | 923442 | − | 232 | SpeE | Spermidine synthase or similar | COG0421 | [E] |
| | | | | | | enzyme that uses putrescine | | |
| 0962 | 923454 | 923702 | + | 82 | | Uncharacterized protein conserved | COG4003 | [S] |
| | | | | | | in archaea | | |
| 0963 | 923724 | 924575 | + | 283 | | Predicted dioxygenase | COG1355 | [R] |
| 0964 | 924582 | 925004 | + | 140 | | Uncharacterized membrane protein | | |
| 0965 | 925021 | 926991 | + | 656 | MCM2_1 | Predicted ATPase involved in | COG1241 | [L] |
| | | | | | | replication control, Cdc46/Mcm | | |
| | | | | | | family | | |
| 0966 | 926988 | 927662 | + | 224 | | Uncharacterized protein conserved | COG3390 | [S] |
| | | | | | | in archaea | | |
| 0967 | 927666 | 928082 | + | 138 | GCD7 | Translation initiation factor elF-2 | COG1601 | [J] |
| 0968 | 928083 | 928427 | + | 114 | | Uncharacterized conserved protein | COG2412 | [S] |
| 0969 | 928424 | 929482 | + | 352 | | Predicted N6-adenine-specific RNA | COG0116 | [L] |
| | | | | | | methylase containing THUMP | | |
| | | | | | | domain | | |
| 0970 | 929468 | 930193 | − | 241 | | Predicted hydrolase of the HAD | COG1011 | [R] |
| | | | | | | superfamily | | |
| 0971 | 930168 | 930926 | + | 252 | | Uncharacterized conserved protein | COG1478 | [S] |
| 0972 | 931280 | 932956 | + | 558 | | Uncharacterized protein specific for | | |
| | | | | | | M. kandleri, MK-8 family | | |
| 0973 | 932946 | 934205 | + | 419 | | Uncharacterized protein specific for | | |
| | | | | | | M. kandleri with repeats, MK-6 family | | |
| 0974 | 934272 | 935483 | + | 403 | ThrC | Threonine synthase | COG0498 | [E] |
| 0975 | 935967 | 936332 | − | 121 | | Uncharacterized conserved protein | | |
| 0976 | 936332 | 938134 | + | 600 | | Predicted membrane protein | COG3356 | [S] |
| 0977 | 938193 | 939227 | + | 344 | | Glycosyl transferase, related to | COG1819 | [GC] |
| | | | | | | UDP-glucuronosyltransferase | | |
| 0978 | 939220 | 939801 | + | 193 | SEC59 | Dolichol kinase | COG0170 | [I] |
| 0979 | 939803 | 940735 | + | 310 | | Uncharacterized membrane protein | | |
| | | | | | | specific for M. kandleri, MK-15 family | | |
| 0980 | 941177 | 942388 | − | 403 | | Predicted Fe—S oxidoreductase | COG0535 | [R] |
| 0981 | 942395 | 943513 | − | 372 | | Predicted membrane-associated Zn- | COG0750 | [M] |
| | | | | | | dependent protease | | |
| 0982 | 943478 | 944167 | + | 229 | | Predicted nucleotidyltransferase of | COG2413 | [R] |
| | | | | | | the DNA polymerase beta | | |
| | | | | | | superfamily | | |
| 0983 | 944171 | 944794 | + | 207 | | Predicted archaea-specific RNA- | COG2517 | [R] |
| | | | | | | binding protein containing a C- | | |
| | | | | | | terminal EMAP domain | | |
| 0984 | 944800 | 945213 | + | 137 | | Transcriptional regulator containing | COG1846 | [K] |
| | | | | | | DNA-binding HTH domain | | |
| 0985 | 945361 | 945537 | − | 58 | | Uncharacterized protein | | |
| 0986 | 945634 | 947301 | + | 555 | LysS | Lysyl-tRNA synthetase (class I) | COG1384 | [J] |
| 0987 | 947313 | 948383 | + | 356 | | Fe—S protein related to pyruvate | COG2108 | [R] |
| | | | | | | formate-lyase activating enzyme | | |
| 0988 | 948365 | 948892 | + | 175 | | Uncharacterized protein | | |
| 0989 | 948921 | 950180 | + | 419 | | Predicted Fe—S oxidoreductase | COG2100 | [R] |
| 0990 | 950200 | 950649 | + | 149 | RpsS | Ribosomal protein S19 | COG0185 | [J] |
| 0991 | 950650 | 951324 | − | 224 | | Uncharacterized protein | | |
| 0992 | 951376 | 952827 | + | 483 | | Fe—S oxidoreductase similar to Mg- | COG1032 | [C] |
| | | | | | | protoporphyrin IX monomethyl ester | | |
| | | | | | | oxidative cyclase-related protein | | |
| | | | | | | and subunits of a Ni-chelatase for | | |
| | | | | | | the biosynthesis of the Ni-containing | | |
| | | | | | | coenzyme F430, which is essential | | |
| | | | | | | for the production of methane in | | |
| | | | | | | methanogens | | |
| 0993 | 952778 | 953764 | − | 328 | ERG12 | Mevalonate kinase | COG1577 | [I] |
| 0994 | 953789 | 954649 | + | 286 | | Uncharacterized protein conserved | COG1667 | [S] |
| | | | | | | in archaea | | |
| 0995 | 954953 | 956260 | + | 435 | MurD_1 | UDP-N-acetylmuramoylalanine-D- | COG0771 | [M] |
| | | | | | | glutamate ligase | | |
| 0996 | 956267 | 957001 | + | 244 | | Archaea-specific enzyme of the | COG1938 | [R] |
| | | | | | | ATP-grasp superfamily | | |
| 0997 | 957063 | 957452 | + | 129 | | Uncharacterized conserved protein | COG1935 | [S] |
| 0998 | 957638 | 958237 | + | 199 | | Predicted cysteine protease of the | COG1305 | [E] |
| | | | | | | transglutaminase-like superfamily | | |
| 0999 | 958234 | 959913 | − | 559 | CDC9 | ATP-dependent DNA ligase | COG1793 | [L] |
| 1000 | 960189 | 961070 | + | 293 | | Predicted serine/threonine protein | COG0478 | [T] |
| | | | | | | kinase | | |
| 1001 | 961247 | 962146 | + | 299 | | Ferredoxin | COG1145 | [C] |
| 1002 | 962187 | 962981 | + | 264 | MhpD | 2-keto-4-pentenoate hydratase | COG0179 | [Q] |
| | | | | | | hydratase | | |
| 1003 | 963347 | 964648 | − | 433 | | Predicted DNA-binding protein | COG1571 | [R] |
| | | | | | | containing a Zn-ribbon | | |
| 1004 | 964675 | 964869 | + | 64 | | Uncharacterized protein | | |
| 1005 | 964874 | 965851 | + | 325 | | Predicted transcriptional regulator | COG1395 | [K] |
| | | | | | | containing a cHTH DNA-binding | | |
| | | | | | | domain | | |
| 1006 | 965913 | 967550 | + | 545 | GroL | HSP60 family chaperonin | COG0459 | [O] |
| 1007 | 967621 | 967887 | − | 88 | | Uncharacterized archaeal membrane | COG2034 | [S] |
| | | | | | | protein | | |
| 1008 | 967906 | 968730 | + | 274 | SecF | Preprotein translocase subunit SecF | COG0341 | [U] |
| 1009 | 968734 | 969945 | + | 403 | SecD | Preprotein translocase subunit SecD | COG0342 | [U] |
| 1010 | 969971 | 971443 | + | 490 | TrkG | Membrane subunit of a Trk-type K+ | COG0168 | [P] |
| 1011 | 971489 | 972157 | + | 222 | TrkA | NAD-binding component of a K+ | COG0569 | [P] |
| 1012 | 972487 | 974457 | + | 656 | NtpI | Archaeal/vacuolar-type H+-ATPase | COG1269 | [C] |
| | | | | | | subunit I | | |
| 1013 | 974472 | 977537 | + | 1021 | NtpK | Archaeal/vacuolar-type H+-ATPase | COG0636 | [C] |
| | | | | | | subunit K | | |
| 1014 | 977572 | 978174 | + | 200 | NtpE | Archaeal/vacuolar-type H+-ATPase | COG1390 | [C] |
| | | | | | | subunit E | | |
| 1015 | 978178 | 979302 | + | 374 | NtpC | Archaeal/vacuolar-type H+-ATPase | COG1527 | [C] |
| | | | | | | subunit C | | |
| 1016 | 979315 | 979653 | + | 112 | NtpF | Archaeal/vacuolar-type H+-ATPase | COG1436 | [C] |
| | | | | | | subunit F | | |
| 1017 | 979665 | 981443 | + | 592 | NtpA | Archaeal/vacuolar-type H+-ATPase | COG1155 | [C] |
| | | | | | | subunit A | | |
| 1018 | 981484 | 982095 | + | 203 | | Uncharacterized conserved protein | COG1901 | [S] |
| 1019 | 982627 | 982932 | − | 101 | | Uncharacterized conserved protein | COG0011 | [S] |
| 1020 | 982920 | 983942 | − | 340 | | Uncharacterized protein | | |
| 1021 | 983976 | 984734 | + | 252 | | Sugar phosphate | COG1082 | [G] |
| | | | | | | isomerase/epimerase | | |
| 1022 | 984769 | 984969 | − | 66 | | Predicted RNA-binding protein, | COG3269 | [R] |
| | | | | | | contains TRAM domain | | |
| 1023 | 985170 | 985793 | − | 207 | | Acyl-CoA synthetase (NDP forming) | COG1042 | [C] |
| 1024 | 985790 | 986929 | − | 379 | | Pyridoxal-phosphate-dependent | COG0436 | [E] |
| | | | | | | aminotransferase | | |
| 1025 | 986956 | 987471 | + | 171 | | Predicted transcriptional regulator of | | |
| | | | | | | amino acid metabolism consisting of | | |
| | | | | | | an ACT domain and a DNA-binding | | |
| | | | | | | HTH domain | | |
| 1026 | 987473 | 988462 | + | 329 | | Uncharacterized conserved protein | COG2419 | [S] |
| 1027 | 988455 | 989405 | + | 316 | | Pyruvate-formate lyase-activating | COG1180 | [O] |
| | | | | | | enzyme | | |
| 1028 | 989456 | 989920 | + | 154 | | ADP-ribose pyrophosphatase | COG1051 | [F] |
| 1029 | 989917 | 990534 | + | 205 | | Uncharacterized protein | | |
| 1030 | 990746 | 991507 | + | 253 | DnaN | DNA polymerase sliding clamp | COG0592 | [L] |
| | | | | | | (PCNA) | | |
| 1031 | 991571 | 992038 | − | 155 | LepB | Type I signal peptidase | COG0681 | [U] |
| 1032 | 992204 | 993154 | + | 316 | RadA_1 | RadA recombinase | COG0468 | [L] |
| 1033 | 993238 | 994077 | − | 279 | | Metal-dependent hydrolase of the | COG1234 | [R] |
| | | | | | | beta-lactamase superfamily | | |
| 1034 | 994067 | 995521 | − | 484 | | Uncharacterized protein | | |
| 1035 | 995608 | 998340 | + | 910 | Lhr | Lhr-like Superfamily II helicase | COG1201 | [R] |
| 1036 | 998337 | 999296 | − | 319 | | Uncharacterized protein specific for | | |
| | | | | | | M. kandleri, MK-38 family | | |
| 1037 | 999306 | 999872 | − | 188 | CobL_1 | Precorrin-6B methylase | COG2242 | [H] |
| 1038 | 999865 | 1000527 | + | 220 | CobF | Precorrin-2 methylase | COG2243 | [H] |
| 1039 | 1000589 | 1003081 | + | 830 | PolB | B family DNA polymerase | COG0417 | [L] |
| 1040 | 1003150 | 1004791 | + | 546 | | Fe—S oxidoreductase | COG1031 | [C] |
| 1041 | 1004793 | 1009553 | − | 1586 | | Predicted protein of the CobN/Mg- | COG1429 | [H] |
| | | | | | | chelatase family | | |
| 1042 | 1009534 | 1009770 | − | 78 | | Uncharacterized protein | | |
| 1043 | 1010030 | 1010881 | + | 283 | | Squalene cyclase | COG1657 | [I] |
| 1044 | 1010902 | 1011384 | + | 160 | | Uncharacterized protein | | |
| 1045 | 1011565 | 1013082 | + | 505 | | Uncharacterized protein | | |
| 1046 | 1013137 | 1013823 | − | 228 | | L-alanine-DL-glutamate epimerase | COG4948 | [MR] |
| | | | | | | and related enzymes of enolase | | |
| | | | | | | superfamily | | |
| 1047 | 1013993 | 1015405 | + | 470 | MurD_2 | UDP-N-acetylmuramoylalanine-D- | COG0771 | [M] |
| | | | | | | glutamate ligase | | |
| 1048 | 1015395 | 1016936 | + | 513 | HyuB | N-methylhydantoinase B | COG0146 | [EQ] |
| 1049 | 1016944 | 1017231 | + | 95 | | Predicted pyrophosphatase | COG1694 | [R] |
| 1050 | 1017228 | 1018340 | + | 370 | | Predicted metal-dependent | COG0402 | [FR] |
| | | | | | | hydrolase related to cytosine | | |
| | | | | | | deaminase | | |
| 1051 | 1018337 | 1018726 | + | 129 | | Predicted nucleotide-binding protein | COG0589 | [T] |
| | | | | | | related to universal stress protein, | | |
| | | | | | | UspA | | |
| 1052 | 1018718 | 1020367 | − | 549 | ELP3 | ELP3 component of the RNA | COG1243 | [KB] |
| | | | | | | polymerase II complex, consists of | | |
| | | | | | | an N-terminal BioB/LipA-like domain | | |
| | | | | | | and a C-terminal histone acetylase | | |
| | | | | | | domain | | |
| 1053 | 1020723 | 1021256 | + | 177 | | Zn-dependent protease | COG1994 | [R] |
| 1054 | 1021422 | 1022354 | − | 310 | | Predicted ATPase of the PP-loop | COG0037 | [D] |
| | | | | | | superfamily implicated in cell cycle | | |
| | | | | | | control | | |
| 1055 | 1022751 | 1023809 | + | 352 | | Predicted deacetylase | COG0123 | [BQ] |
| 1056 | 1024357 | 1026507 | − | 716 | | Predicted exporter of the RND | COG1033 | [R] |
| | | | | | | superfamily | | |
| 1057 | 1026786 | 1027487 | + | 233 | | Zn-ribbon-containing-protein | | |
| 1058 | 1027491 | 1028459 | + | 322 | | Fe—S oxidoreductase | COG4004 & | [S][C] |
| | | | | | | | COG0731 | |
| 1059 | 1028450 | 1028851 | − | 133 | | Uncharacterized membrane protein | | |
| 1060 | 1028915 | 1029487 | + | 190 | | Predicted nucleotide kinase related | COG1936 | [F] |
| | | | | | | to CMP and AMP kinase | | |
| 1061 | 1029500 | 1030444 | + | 314 | | Acetyltransferase (the isoleucine | COG0110 | [R] |
| | | | | | | patch superfamily) | | |
| 1062 | 1030519 | 1031127 | + | 202 | PDX2 | Predicted glutamine | COG0311 | [H] |
| | | | | | | amidotransferase involved in | | |
| | | | | | | pyridoxine biosynthesis | | |
| 1063 | 1031140 | 1032081 | + | 313 | GltB_2 | Glutamate synthase subunit 1 | COG0067 | [E] |
| 1064 | 1032078 | 1032770 | + | 230 | GltB_3 | Glutamate synthase subunit 3 | COG0070 | [E] |
| 1065 | 1032777 | 1033466 | + | 229 | | Predicted PP-loop superfamily | COG0603 | [R] |
| | | | | | | ATPase | | |
| 1066 | 1033579 | 1033920 | + | 113 | | Uncharacterized protein | | |
| 1067 | 1033966 | 1035177 | + | 403 | | Predicted SAM-dependent | COG1092 | [R] |
| | | | | | | methyltransferase | | |
| 1068 | 1035174 | 1036619 | − | 481 | | Uncharacterized membrane protein | | |
| | | | | | | specific for M. kandleri, MK-25 family | | |
| 1069 | 1036609 | 1037562 | − | 317 | Mdh | NADPH-dependent L-malate | COG0039 | [C] |
| | | | | | | dehydrogenase | | |
| 1070 | 1037571 | 1038509 | − | 312 | ArgF | Ornithine carbamoyltransferase | COG0078 | [E] |
| 1071 | 1038509 | 1039858 | − | 449 | PurD | Phosphoribosylamine-glycine ligase | COG0151 | [F] |
| 1072 | 1039833 | 1040384 | − | 183 | PyrE | Orotate phosphoribosyltransferase | COG0461 | [F] |
| 1073 | 1040378 | 1040899 | − | 173 | CdsA | CDP-diglyceride synthetase | COG0575 | [I] |
| 1074 | 1040918 | 1042417 | + | 499 | | Predicted Fe—S oxidoreductase | COG1964 | [R] |
| 1075 | 1042423 | 1043175 | + | 250 | SIR2 | NAD-dependent protein deacetylase, | COG0846 | [K] |
| | | | | | | SIR2 family | | |
| 1076 | 1043739 | 1044446 | − | 235 | | Uncharacterized Rossman fold | COG1634 | [R] |
| | | | | | | enzyme | | |
| 1077 | 1044460 | 1045491 | + | 343 | ArgC | Acetylglutamate semialdehyde | COG0002 | [E] |
| | | | | | | dehydrogenase | | |
| 1078 | 1045573 | 1046004 | − | 143 | | Predicted hydrocarbon binding | COG1719 | [R] |
| | | | | | | protein (contains V4R domain) | | |
| 1079 | 1046073 | 1046807 | − | 244 | | Metal-dependent hydrolases of the | COG1237 | [R] |
| | | | | | | beta-lactamase superfamily II | | |
| 1080 | 1047394 | 1047978 | + | 194 | MobB | Molybdopterin-guanine dinucleotide | COG1763 | [H] |
| | | | | | | biosynthesis protein | | |
| 1081 | 1048183 | 1049454 | − | 423 | MiaB | 2-methylthioadenine synthetase | COG0621 | [J] |
| 1082 | 1049460 | 1050929 | − | 489 | | Uncharacterized membrane protein | | |
| | | | | | | specific for M. kandleri, MK-16 family | | |
| 1083 | 1050955 | 1052430 | − | 491 | | Predicted glycosyltransferase | COG0438 | [M] |
| 1084 | 1052589 | 1054142 | − | 517 | | Queuine tRNA-ribosyltransferase, | COG1549 | [J] |
| | | | | | | contains RNA-binding PUA domain | | |
| 1085 | 1054126 | 1055544 | − | 472 | PurB | Adenylosuccinate lyase | COG0015 | [F] |
| 1086 | 1055634 | 1056806 | − | 390 | | Ferredoxin domain fused to | COG1145 & | [C][R] |
| | | | | | | pyruvate-formate lyase-activating | COG0535 | |
| | | | | | | enzyme | | |
| 1087 | 1056850 | 1057029 | − | 59 | | Nitrogen regulatory protein PII | COG0347 | [E] |
| | | | | | | homolog | | |
| 1088 | 1057581 | 1058501 | + | 306 | | Uncharacterized protein conserved | COG3366 | [S] |
| | | | | | | in archaea | | |
| 1089 | 1058600 | 1058881 | + | 93 | Ssh10b_2 | Archaea-specific DNA-binding | COG1581 | [K] |
| | | | | | | protein | | |
| 1090 | 1058918 | 1059742 | + | 274 | | CBS-domain-containing protein | COG0517 | [R] |
| 1091 | 1059786 | 1061828 | + | 680 | HyuA_1 | N-methylhydantoinase A | COG0145 | [EQ] |
| 1092 | 1061983 | 1062237 | + | 84 | | Uncharacterized protein | | |
| 1093 | 1062427 | 1063875 | − | 482 | HyuA_2 | N-methylhydantoinase A | COG0145 | [EQ] |
| 1094 | 1063943 | 1064371 | − | 142 | | Uncharacterized domain specific for | | |
| | | | | | | M. kandleri, MK_11 | | |
| 1095 | 1064771 | 1065691 | − | 306 | | Uncharacterized protein | | |
| 1096 | 1066239 | 1067360 | − | 373 | | Uncharacterized protein specific for | | |
| | | | | | | M. kandleri, MK-7 family | | |
| 1097 | 1067565 | 1067867 | − | 100 | | Uncharacterized protein specific for | | |
| | | | | | | M. kandleri, MK-45 family | | |
| 1098 | 1067881 | 1068231 | − | 116 | | Uncharacterized protein specific for | | |
| | | | | | | M. kandleri, MK-35 family | | |
| 1099 | 1068430 | 1069563 | − | 377 | | Uncharacterized protein specific for | | |
| | | | | | | M. kandleri, MK-7 family | | |
| 1100 | 1070068 | 1071114 | + | 348 | | Predicted extracellular | COG2342 | [G] |
| | | | | | | polysaccharide hydrolase of the | | |
| | | | | | | endo alpha-1,4 | | |
| | | | | | | polygalactosaminidase family | | |
| 1101 | 1071283 | 1072530 | + | 415 | | Uncharacterized protein specific for | | |
| | | | | | | M. kandleri, MK-32 family | | |
| 1102 | 1072764 | 1073159 | − | 131 | Fur_1 | Predicted transcriptional regulator | COG0640 | [K] |
| | | | | | | containing a HTH DNA-binding | | |
| | | | | | | domain | | |
| 1103 | 1073510 | 1074421 | + | 303 | | Predicted ATPase of the PP-loop | COG0037 | [D] |
| | | | | | | superfamily implicated in cell cycle | | |
| | | | | | | control | | |
| 1104 | 1074418 | 1075152 | − | 244 | | Uncharacterized membrane protein | | |
| | | | | | | specific for M. kandleri, MK-4 family | | |
| 1105 | 1075156 | 1076343 | − | 395 | | Uncharacterized conserved protein | COG1641 | [S] |
| 1106 | 1076417 | 1076743 | + | 108 | | Nitrogen regulatory protein PII | COG4075 | [S] |
| | | | | | | homolog | | |
| 1107 | 1076740 | 1077711 | − | 323 | | Predicted metabolic regulator | COG1719 | [R] |
| | | | | | | containing two V4R domains | | |
| 1108 | 1077887 | 1079302 | − | 471 | | NAD-dependent aldehyde | COG1012 | [C] |
| | | | | | | dehydrogenase | | |
| 1109 | 1079336 | 1080184 | − | 282 | | Uncharacterized protein | | |
| 1110 | 1080370 | 1081089 | − | 239 | | Uncharacterized protein | | |
| 1111 | 1081197 | 1082513 | + | 438 | | Uncharacterized protein | | |
| 1112 | 1082635 | 1084164 | − | 509 | | Uncharacterized protein specific for | | |
| | | | | | | M. kandleri, MK-8 family | | |
| 1113 | 1084374 | 1084985 | − | 203 | | Uncharacterized protein specific for | | |
| | | | | | | M. kandleri, MK-22 family | | |
| 1114 | 1085323 | 1086447 | − | 374 | | Uncharacterized secreted protein | | |
| | | | | | | specific for M. kandleri with repeats, | | |
| | | | | | | MK-6 family | | |
| 1115 | 1086530 | 1088314 | − | 594 | | Uncharacterized secreted protein | | |
| | | | | | | specific for M. kandleri with repeats, | | |
| | | | | | | MK-6 family | | |
| 1116 | 1088392 | 1090035 | − | 547 | | Uncharacterized protein specific for | | |
| | | | | | | M. kandleri, MK-8 family | | |
| 1117 | 1090497 | 1090760 | − | 87 | | Uncharacterized protein | | |
| 1118 | 1090917 | 1091960 | − | 347 | | Uncharacterized protein | | |
| 1119 | 1091917 | 1092153 | − | 78 | | Uncharacterized protein | | |
| 1120 | 1092364 | 1093884 | − | 506 | MCM2_2 | Predicted ATPase involved in | COG1241 | [L] |
| | | | | | | replication control, Cdc46/Mcm | | |
| | | | | | | family | | |
| 1121 | 1095025 | 1095999 | + | 324 | | Uncharacterized protein specific for | | |
| | | | | | | M. kandleri, MK-23 family | | |
| 1122 | 1096289 | 1097245 | + | 318 | HmdIII | N5,N10- | COG4007 | [R] |
| | | | | | | methylenetetrahydromethanopterin | | |
| | | | | | | dehydrogenase (H2-forming) | | |
| 1123 | 1097550 | 1097834 | − | 94 | | Uncharacterized protein conserved | | |
| | | | | | | in archaea | | |
| 1124 | 1098197 | 1099186 | + | 329 | | Uncharacterized membrane protein | | |
| 1125 | 1099190 | 1100172 | − | 327 | | Predicted extracellular | COG2342 | [G] |
| | | | | | | polysaccharide hydrolase of the | | |
| | | | | | | Endo alpha-1,4 | | |
| | | | | | | polygalactosaminidase family | | |
| 1126 | 1101061 | 1101891 | − | 276 | FtsZ_3 | FtsZ GTPase involved in cell division | COG0206 | [D] |
| 1127 | 1102191 | 1102478 | + | 95 | | Predicted membrane protein | | |
| 1128 | 1102596 | 1103690 | − | 364 | | Permease of the major facilitator | COG0477 | [GEPR] |
| | | | | | | superfamily | | |
| 1129 | 1104523 | 1105320 | + | 265 | | Predicted protease or amidase | COG0693 | [R] |
| 1130 | 1105400 | 1105687 | + | 95 | | Uncharacterized protein | | |
| 1131 | 1107532 | 1108419 | − | 295 | | Uncharacterized protein specific for | | |
| | | | | | | M. kandleri, MK-23 family | | |
| 1132 | 1109620 | 1110027 | + | 135 | | Uncharacterized conserved protein | COG2250 | [S] |
| | | | | | | related to C-terminal domain of | | |
| | | | | | | eukaryotic chaperone, SACSIN | | |
| 1133 | 1110240 | 1110470 | − | 76 | | Uncharacterized protein | | |
| 1134 | 1113424 | 1114281 | + | 285 | | Uncharacterized protein | | |
| 1135 | 1114332 | 1115444 | + | 370 | | Permease of the major facilitator | COG0477 | [GEPR] |
| | | | | | | superfamily | | |
| 1136 | 1115624 | 1116253 | + | 209 | | Uncharacterized protein specific for | | |
| | | | | | | M. kandleri, MK-1 family | | |
| 1137 | 1116295 | 1116663 | − | 122 | | Predicted nucleotidyltransferase of | COG1708 | [R] |
| | | | | | | the DNA polymerase beta | | |
| | | | | | | superfamily | | |
| 1138 | 1116684 | 1116905 | + | 73 | | Uncharacterized conserved protein | COG2250 | [S] |
| | | | | | | related to C-terminal domain of | | |
| | | | | | | eukaryotic chaperone, SACSIN | | |
| 1139 | 1116898 | 1117071 | + | 57 | | Uncharacterized protein | | |
| 1140 | 1117134 | 1117373 | − | 79 | | Uncharacterized protein | | |
| 1141 | 1117370 | 1117810 | − | 146 | | Uncharacterized membrane protein | | |
| | | | | | | specific for M. kandleri, MK-17 family | | |
| 1142 | 1117919 | 1118431 | − | 170 | | Uncharacterized protein specific for | | |
| | | | | | | M. kandleri, MK-22 family | | |
| 1143 | 1119001 | 1119915 | − | 304 | | Uncharacterized protein | | |
| 1144 | 1120281 | 1121489 | − | 402 | | Predicted membrane protein | | |
| 1145 | 1122067 | 1122807 | + | 246 | | Predicted membrane protein | | |
| 1146 | 1122763 | 1123665 | − | 300 | | Uncharacterized membrane protein | | |
| | | | | | | specific for M. kandleri, MK-9 family | | |
| 1147 | 1125171 | 1125659 | − | 162 | | Uncharacterized protein specific for | | |
| | | | | | | M. kandleri, MK-5 family | | |
| 1148 | 1125923 | 1130821 | + | 1632 | | Uncharacterized secreted protein | | |
| | | | | | | specific for M. kandleri with repeats, | | |
| | | | | | | MK-5 family | | |
| 1149 | 1130814 | 1136363 | + | 1849 | | Uncharacterized secreted protein | | |
| | | | | | | specific for M. kandleri with repeats, | | |
| | | | | | | MK-5 family | | |
| 1150 | 1136364 | 1137101 | + | 245 | | Predicted membrane protein | | |
| 1151 | 1137105 | 1137752 | + | 215 | | Predicted membrane protein | | |
| 1152 | 1138095 | 1138991 | + | 298 | | Uncharacterized membrane protein | | |
| | | | | | | specific for M. kandleri, MK-9 family | | |
| 1153 | 1139217 | 1139651 | + | 144 | | Predicted membrane protein | | |
| 1154 | 1139945 | 1141204 | + | 419 | | Uncharacterized membrane protein | | |
| | | | | | | specific for M. kandleri, MK-9 family | | |
| 1155 | 1141640 | 1142470 | + | 276 | | Uncharacterized membrane protein | | |
| 1156 | 1142499 | 1142942 | + | 147 | | Uncharacterized protein specific for | | |
| | | | | | | M. kandleri, MK-24 family | | |
| 1157 | 1143512 | 1144135 | − | 207 | | Uncharacterized protein specific for | | |
| | | | | | | M. kandleri, MK-1 family | | |
| 1158 | 1144383 | 1145600 | − | 405 | | Uncharacterized membrane protein | | |
| | | | | | | specific for M. kandleri, MK-9 family | | |
| 1159 | 1145844 | 1146677 | + | 277 | | Uncharacterized membrane protein | | |
| | | | | | | specific for M. kandleri, MK-26 family | | |
| 1160 | 1146822 | 1147688 | + | 288 | | Uncharacterized membrane protein | | |
| | | | | | | specific for M. kandleri, MK-26 family | | |
| 1161 | 1148015 | 1148680 | + | 221 | | Uncharacterized membrane protein | | |
| | | | | | | specific for M. kandleri, MK-9 family | | |
| 1162 | 1148705 | 1149403 | + | 232 | | Uncharacterized membrane protein | | |
| | | | | | | specific for M. kandleri, MK-17 family | | |
| 1163 | 1149695 | 1150318 | − | 207 | | Uncharacterized protein specific for | | |
| | | | | | | M. kandleri, MK-1 family | | |
| 1164 | 1151111 | 1151647 | − | 178 | | Thermonuclease | COG1525 | [L] |
| 1165 | 1151966 | 1152913 | − | 315 | | Uncharacterized protein | | |
| 1166 | 1152967 | 1154208 | − | 413 | | Uncharacterized conserved protein | COG3287 | [S] |
| 1167 | 1155432 | 1156157 | + | 241 | | Uncharacterized protein | | |
| 1168 | 1156220 | 1157155 | + | 311 | | Uncharacterized secreted protein | | |
| | | | | | | specific for M. kandleri, MK-6 family | | |
| 1169 | 1158073 | 1158933 | − | 286 | | Uncharacterized protein | | |
| 1170 | 1160085 | 1161410 | − | 441 | | Fusion of at least two | | |
| | | | | | | uncharacterized domain specific for | | |
| | | | | | | M. kandleri, MK-12 family | | |
| 1171 | 1161703 | 1162374 | − | 223 | | Predicted membrane-bound metal- | COG1988 | [R] |
| | | | | | | dependent hydrolase | | |
| 1172 | 1162560 | 1163432 | + | 290 | | Uncharacterized protein | | |
| 1173 | 1163540 | 1164262 | + | 240 | | Uncharacterized protein specific for | | |
| | | | | | | M. kandleri, MK-27 family | | |
| 1174 | 1165552 | 1166187 | + | 211 | | Predicted membrane protein | | |
| 1175 | 1167028 | 1167396 | − | 122 | | Uncharacterized protein | | |
| 1176 | 1167393 | 1167758 | − | 121 | | Uncharacterized protein | | |
| 1177 | 1168689 | 1171121 | + | 810 | | Protein containing a metal-binding | | |
| | | | | | | domain shared with | | |
| | | | | | | formylmethanofuran dehydrogenase | | |
| | | | | | | subunit E | | |
| 1178 | 1171194 | 1174100 | + | 968 | | Uncharacterized protein conserved | | |
| | | | | | | in archaea | | |
| 1179 | 1174103 | 1174543 | − | 146 | | Uncharacterized protein | | |
| 1180 | 1174740 | 1175693 | − | 317 | | Uncharacterized protein | | |
| 1181 | 1176046 | 1176945 | + | 299 | | Uncharacterized protein specific for | | |
| | | | | | | M. kandleri, MK-7 family | | |
| 1182 | 1177071 | 1177787 | − | 238 | | Uncharacterized protein specific for | | |
| | | | | | | M. kandleri, MK-27 family | | |
| 1183 | 1178571 | 1179359 | − | 262 | | Polyferredoxin | COG0348 | [C] |
| 1184 | 1179463 | 1179858 | − | 131 | | Uncharacterized protein | | |
| 1185 | 1179906 | 1180262 | − | 118 | | Uncharacterized protein | | |
| 1186 | 1181791 | 1182024 | + | 77 | | Uncharacterized protein specific for | | |
| | | | | | | M. kandleri, MK-20 family | | |
| 1187 | 1182514 | 1183490 | + | 325 | | Predicted extracellular | COG2342 | [G] |
| | | | | | | polysaccharide hydrolase of the | | |
| | | | | | | endo alpha-1,4 | | |
| | | | | | | polygalactosaminidase family | | |
| 1188 | 1183487 | 1183930 | + | 147 | | Uncharacterized protein | | |
| 1189 | 1184101 | 1185807 | − | 568 | | ATPase subunit of an ABC-type | COG1123 | [R] |
| | | | | | | transport system, contains a | | |
| | | | | | | duplicated ATPase domain | | |
| 1190 | 1185746 | 1186216 | − | 156 | | Uncharacterized protein | | |
| 1191 | 1186199 | 1186804 | + | 201 | | Membrane-associated phospholipid | COG0671 | [I] |
| | | | | | | phosphatase | | |
| 1192 | 1186783 | 1187529 | + | 248 | | Uncharacterized conserved protein | COG0327 | [S] |
| 1193 | 1187747 | 1189015 | + | 422 | | Predicted phosphoglycerate mutase, | COG3635 | [G] |
| | | | | | | AP superfamily | | |
| 1194 | 1189020 | 1189562 | + | 180 | | Predicted membrane protein | COG1238 | [S] |
| 1195 | 1189569 | 1190054 | + | 161 | PurE | Phosphoribosylcarboxyaminoimidazole | COG0041 | [F] |
| | | | | | | (NCAIR) mutase | | |
| 1196 | 1190035 | 1190634 | − | 199 | CobH | Precorrin isomerase | COG2082 | [H] |
| 1197 | 1190631 | 1192280 | − | 549 | IlvD | Dihydroxyacid dehydratase | COG0129 | [EG] |
| 1198 | 1192330 | 1192938 | + | 202 | | Integral membrane protein of the | COG2095 | [U] |
| | | | | | | MarC family | | |
| 1199 | 1192943 | 1194109 | + | 388 | | Predicted GTPase of the OBG/HflX | COG1163 | [R] |
| | | | | | | superfamily | | |
| 1200 | 1194106 | 1194801 | + | 231 | | Uncharacterized, MobA-related | COG2068 | [R] |
| | | | | | | protein | | |
| 1201 | 1194798 | 1194998 | − | 66 | TatA | Sec-independent protein secretion | COG1826 | [U] |
| | | | | | | pathway component | | |
| 1202 | 1195047 | 1195664 | − | 205 | HyaB | Ni,Fe-hydrogenase I large subunit | COG0374 | [C] |
| 1203 | 1195681 | 1196247 | − | 188 | | Uncharacterized protein | | |
| 1204 | 1196692 | 1196952 | − | 86 | | Uncharacterized protein | | |
| 1205 | 1196967 | 1197401 | − | 144 | | Uncharacterized protein | | |
| 1206 | 1197474 | 1197980 | − | 168 | LeuD_2 | 3-isopropylmalate dehydratase small | COG0066 | [E] |
| | | | | | | subunit | | |
| 1207 | 1197964 | 1198437 | − | 157 | | Predicted membrane protein | COG3431 | [S] |
| 1208 | 1198443 | 1199651 | − | 402 | LeuC_2 | 3-isopropylmalate dehydratase large | COG0065 | [E] |
| | | | | | | subunit | | |
| 1209 | 1200171 | 1201364 | − | 397 | LeuA | Isopropylmalate synthase | COG0119 | [E] |
| 1210 | 1201369 | 1201722 | − | 117 | | Uncharacterized conserved protein | COG1993 | [S] |
| 1211 | 1201704 | 1202099 | − | 131 | CrcB | Integral membrane protein possibly | COG0239 | [D] |
| | | | | | | involved in chromosome | | |
| | | | | | | condensation | | |
| 1212 | 1202106 | 1202915 | − | 269 | | Uncharacterized bacitracin | COG1968 | [V] |
| | | | | | | resistance protein | | |
| 1213 | 1203140 | 1203412 | + | 90 | | Predicted metabolic regulator | COG3830 | [T] |
| | | | | | | containing an ACT domain | | |
| 1214 | 1203418 | 1204770 | + | 450 | | Uncharacterized conserved protein | COG2848 | [S] |
| 1215 | 1204838 | 1205845 | + | 335 | LeuB_2 | Isopropylmalate dehydrogenase | COG0473 | [E] |
| 1216 | 1206266 | 1206589 | + | 107 | POP4_2 | RNAse P subunit P29 | COG1588 | [J] |
| 1217 | 1206586 | 1206942 | + | 118 | RpsQ | Ribosomal protein S17 | COG0186 | [J] |
| 1218 | 1206955 | 1207356 | + | 133 | RplN | Ribosomal protein L14 | COG0093 | [J] |
| 1219 | 1207371 | 1207820 | + | 149 | RplX | Ribosomal protein L24 | COG0198 | [J] |
| 1220 | 1207835 | 1208617 | + | 260 | RPS4A | Ribosomal protein S4E | COG1471 | [J] |
| 1221 | 1208630 | 1209190 | + | 186 | RplE | Ribosomal protein L5 | COG0094 | [J] |
| 1222 | 1209205 | 1209351 | + | 48 | RpsN | Ribosomal protein S14 | COG0199 | [J] |
| 1223 | 1209368 | 1209760 | + | 130 | RpsH | Ribosomal protein S8 | COG0096 | [J] |
| 1224 | 1209774 | 1210388 | + | 204 | RplF | Ribosomal protein L6 | COG0097 | [J] |
| 1225 | 1210401 | 1210796 | + | 131 | RPL32 | Ribosomal protein L32E | COG1717 | [J] |
| 1226 | 1210813 | 1211850 | − | 345 | PurM | Phosphoribosylaminoimidazol (AIR) | COG0150 | [F] |
| | | | | | | synthetase | | |
| 1227 | 1211864 | 1213822 | − | 652 | | Predicted metal-dependent RNase, | COG1782 | [R] |
| | | | | | | consists of a metallo-beta-lactamase | | |
| | | | | | | domain and an RNA-binding KH | | |
| | | | | | | domain | | |
| 1228 | 1213888 | 1214520 | − | 210 | HslV_2 | Protease subunit of the proteasome | COG0638 | [O] |
| 1229 | 1214563 | 1216020 | − | 485 | ProS | Prolyl-tRNA synthetase | COG0442 | [J] |
| 1230 | 1215994 | 1217055 | + | 353 | GldA | Glycerol dehydrogenase | COG0371 | [C] |
| 1231 | 1217045 | 1217704 | − | 219 | SlpA | FKBP-type peptidyl-prolyl cis-trans | COG1047 | [O] |
| | | | | | | isomerase | | |
| 1232 | 1217710 | 1218660 | − | 316 | SufB | ABC-type transport system involved | COG0719 | [O] |
| | | | | | | in Fe—S cluster assembly, permease | | |
| | | | | | | component | | |
| 1233 | 1218618 | 1219331 | − | 237 | SufC | ABC-type transport system involved | COG0396 | [O] |
| | | | | | | in Fe—S cluster assembly, ATPase | | |
| | | | | | | component | | |
| 1234 | 1219555 | 1220589 | + | 344 | | Uncharacterized protein | | |
| 1235 | 1220565 | 1221341 | − | 258 | | Predicted endonuclease of the RecB | COG4998 | [L] |
| | | | | | | family | | |
| 1236 | 1221500 | 1222936 | − | 478 | | Acetolactate synthase large subunit | COG0028 | [EH] |
| | | | | | | homolog | | |
| 1237 | 1222933 | 1223619 | − | 228 | | Predicted DNA-binding protein | COG1458 | [R] |
| | | | | | | containing PIN domain | | |
| 1238 | 1223616 | 1224314 | − | 232 | | Uncharacterized protein | | |
| 1239 | 1224388 | 1225167 | − | 259 | | MinD superfamily P-loop ATPase | COG1149 | [C] |
| | | | | | | containing an inserted ferredoxin | | |
| | | | | | | domain | | |
| 1240 | 1225182 | 1225970 | − | 262 | | MinD superfamily P-loop ATPase | COG1149 | [C] |
| | | | | | | containing an inserted ferredoxin | | |
| | | | | | | domain | | |
| 1241 | 1225978 | 1226307 | − | 109 | | Uncharacterized conserved protein | COG1433 | [S] |
| 1242 | 1226308 | 1226547 | − | 79 | | Zn-ribbon-containing protein | | |
| 1243 | 1226554 | 1226736 | − | 60 | | Ferredoxin | COG1145 | [C] |
| 1244 | 1226760 | 1227170 | − | 136 | | Uncharacterized protein conserved | | |
| | | | | | | in archaea | | |
| 1245 | 1227252 | 1227620 | + | 122 | | CBS-domain | COG0517 | [R] |
| 1246 | 1227625 | 1228965 | + | 446 | | Acyl-CoA synthetase (NDP forming) | COG1042 | [C] |
| 1247 | 1228998 | 1229237 | + | 79 | FeoA | Ferrous ion uptake system subunit | COG1918 | [P] |
| 1248 | 1229242 | 1231194 | + | 650 | FeoB | Ferrous ion uptake system subunit, | COG0370 | [P] |
| | | | | | | predicted GTPase | | |
| 1249 | 1231755 | 1232132 | − | 125 | | Rubrerythrin | COG1592 | [C] |
| 1250 | 1232451 | 1232984 | − | 177 | | Uncharacterized membrane protein | | |
| 1251 | 1234371 | 1235411 | − | 346 | | Uncharacterized protein | | |
| 1252 | 1236233 | 1236910 | − | 225 | | Uncharacterized protein specific for | | |
| | | | | | | M. kandleri, MK-1 family | | |
| 1253 | 1237175 | 1240579 | + | 1134 | | Uncharacterized secreted protein | | |
| | | | | | | specific for M. kandleri, MK-28 family | | |
| 1254 | 1241043 | 1241195 | + | 50 | | Uncharacterized protein | | |
| 1255 | 1241416 | 1241982 | + | 188 | | Predicted RNA-binding protein | | |
| | | | | | | containing PIN domain | | |
| 1256 | 1241966 | 1242934 | − | 322 | | Uncharacterized domain specific for | | |
| | | | | | | M. kandleri, MK-34 family | | |
| 1257 | 1243554 | 1244471 | − | 305 | | Uncharacterized protein | | |
| 1258 | 1244552 | 1245679 | + | 375 | | Predicted hydrolase of the metallo- | COG0595 | [R] |
| | | | | | | beta-lactamase superfamily fused to | | |
| | | | | | | a uncharacterized domain | | |
| 1259 | 1245681 | 1248527 | − | 948 | | Adenine-specific DNA methylase | COG1743 | [L] |
| | | | | | | containing a Zn-ribbon | | |
| 1260 | 1248593 | 1250761 | + | 722 | | Predicted ATPase of the AAA+ class | COG1483 | [R] |
| 1261 | 1253762 | 1254154 | + | 130 | Fur_2 | Fe2+/Zn2+ uptake regulator similar | COG0640 | [K] |
| | | | | | | to transcriptional regulators | | |
| 1262 | 1254242 | 1255155 | + | 303 | | ATPase involved in chromosome | COG1192 | [D] |
| | | | | | | partitioning | | |
| 1263 | 1255170 | 1255841 | + | 223 | | Uncharacterized protein specific for | | |
| | | | | | | M. kandleri, MK-29 family | | |
| 1264 | 1255904 | 1257532 | + | 542 | | Uncharacterized protein specific for | | |
| | | | | | | M. kandleri, MK-37 family | | |
| 1265 | 1257546 | 1258277 | + | 243 | | Uncharacterized protein | | |
| 1266 | 1258311 | 1259615 | + | 434 | | Uncharacterized protein specific for | | |
| | | | | | | M. kandleri, MK-37 family | | |
| 1267 | 1259840 | 1261165 | + | 441 | | Uncharacterized protein specific for | | |
| | | | | | | M. kandleri, MK-37 family | | |
| 1268 | 1261784 | 1263256 | − | 490 | | Uncharacterized secreted protein | | |
| | | | | | | specific for M. kandleri, MK-28 family | | |
| 1269 | 1264021 | 1264473 | + | 150 | | Uncharacterized protein specific for | | |
| | | | | | | M. kandleri, MK-1 family | | |
| 1270 | 1264935 | 1265888 | − | 317 | | Uncharacterized protein | | |
| 1271 | 1266112 | 1267695 | − | 527 | | Uncharacterized protein | | |
| 1272 | 1267711 | 1269366 | − | 551 | | Uncharacterized protein | | |
| 1273 | 1269348 | 1270529 | − | 393 | | Uncharacterized secreted protein | | |
| | | | | | | specific for M. kandleri, MK-5 family | | |
| 1274 | 1270586 | 1271590 | − | 334 | | Predicted hydrolase of the metallo- | COG0595 | [R] |
| | | | | | | beta-lactamase superfamily | | |
| 1275 | 1271731 | 1272240 | − | 169 | | Uncharacterized protein conserved | COG1795 | [S] |
| | | | | | | in archaea | | |
| 1276 | 1272292 | 1273644 | − | 450 | | Fusion of at least two | | |
| | | | | | | uncharacterized domain specific for | | |
| | | | | | | M. kandleri, MK-12 family | | |
| 1277 | 1274035 | 1274772 | + | 245 | | Uncharacterized protein specific for | | |
| | | | | | | M. kandleri, MK-14 family | | |
| 1278 | 1275808 | 1277502 | − | 564 | | Uncharacterized protein specific for | | |
| | | | | | | M. kandleri, MK-19 family | | |
| 1279 | 1277672 | 1278295 | + | 207 | | Uncharacterized protein | | |
| 1280 | 1278820 | 1279008 | + | 62 | | Uncharacterized protein | | |
| 1281 | 1279599 | 1280219 | − | 206 | | Uncharacterized protein specific for | | |
| | | | | | | M. kandleri, MK-14 family | | |
| 1282 | 1280956 | 1281933 | − | 325 | | Uncharacterized protein conserved | | |
| | | | | | | in archaea | | |
| 1283 | 1282214 | 1283809 | − | 531 | | Fusion of at least two | | |
| | | | | | | uncharacterized domain specific for | | |
| | | | | | | M. kandleri, MK-2 family | | |
| 1284 | 1283981 | 1284406 | − | 141 | | Uncharacterized conserved protein | COG2250 | [S] |
| | | | | | | related to C-terminal domain of | | |
| | | | | | | eukaryotic chaperone, SACSIN | | |
| 1285 | 1284412 | 1284786 | + | 124 | | Predicted nucleotidyltransferase of | COG1708 | [R] |
| | | | | | | the DNA polymerase beta family | | |
| 1286 | 1285068 | 1286045 | + | 325 | | Uncharacterized secreted protein | | |
| | | | | | | specific for M. kandleri, MK-30 family | | |
| 1287 | 1286185 | 1286763 | − | 192 | | Uncharacterized protein specific for | | |
| | | | | | | M. kandleri, MK-1 family | | |
| 1288 | 1287009 | 1287983 | − | 324 | | Uncharacterized secreted protein | | |
| | | | | | | specific for M. kandleri, MK-3 family | | |
| 1289 | 1288128 | 1290386 | + | 752 | | Adenine-specific DNA methylase | COG1743 | [L] |
| | | | | | | containing a Zn-ribbon | | |
| 1290 | 1290370 | 1291122 | + | 250 | | Uncharacterized protein | | |
| 1291 | 1291279 | 1291923 | − | 214 | | Uncharacterized protein specific for | | |
| | | | | | | M. kandleri, MK-1 family | | |
| 1292 | 1292092 | 1292835 | − | 247 | | Predicted nucleotidyltransferase of | COG1708 & | [R][S] |
| | | | | | | the DNA polymerase beta | COG2250 | |
| | | | | | | supefamily fused to an | | |
| | | | | | | Uncharacterized conserved protein | | |
| | | | | | | related to C-terminal domain of | | |
| | | | | | | eukaryotic chaperone, SACSIN | | |
| 1293 | 1292953 | 1294143 | + | 396 | | Uncharacterized protein conserved | COG4006 | [S] |
| | | | | | | in archaea | | |
| 1294 | 1294371 | 1295660 | + | 429 | | Uncharacterized protein | | |
| 1295 | 1295771 | 1296877 | − | 368 | | Uncharacterized secreted protein | | |
| | | | | | | specific for M. kandleri, MK-3 family | | |
| 1296 | 1298182 | 1300266 | − | 694 | | Predicted component of a | COG1336 & | [L][L] |
| | | | | | | thermophile-specific DNA repair | COG1604 | |
| | | | | | | system, contains two domains of the | | |
| | | | | | | RAMP family | | |
| 1297 | 1301091 | 1303472 | + | 793 | | Predicted DNA-dependent DNA | COG1353 | [R] |
| | | | | | | polymerase, component of a | | |
| | | | | | | thermophile-specific DNA repair | | |
| | | | | | | system | | |
| 1298 | 1303469 | 1304803 | + | 444 | | Uncharacterized protein | | |
| 1299 | 1304800 | 1305828 | + | 342 | | Predicted component of a | COG1336 | [L] |
| | | | | | | thermophile-specific DNA repair | | |
| | | | | | | system, contains a RAMP domain | | |
| 1300 | 1308020 | 1308490 | − | 156 | | Uncharacterized protein | | |
| 1301 | 1308525 | 1310213 | − | 562 | | Squalene cyclase | COG1657 | [I] |
| 1302 | 1311974 | 1312216 | + | 80 | | Uncharacterized protein | | |
| 1303 | 1312185 | 1313237 | − | 350 | | Uncharacterized domain specific for | | |
| | | | | | | M. kandleri, MK-11 family | | |
| 1304 | 1313373 | 1314599 | − | 408 | | Uncharacterized protein specific for | | |
| | | | | | | M. kandleri, MK-14 family | | |
| 1305 | 1314596 | 1316125 | − | 509 | | Uncharacterized membrane protein | | |
| | | | | | | specific for M. kandleri, MK-16 family | | |
| 1306 | 1316132 | 1317607 | − | 491 | | Predicted glycosyltransferase | COG0438 | [M] |
| 1307 | 1319237 | 1319530 | − | 97 | | Predicted nucleotidyltransferase of | COG1708 | [R] |
| | | | | | | the DNA polymerase beta | | |
| | | | | | | superfamily | | |
| 1308 | 1319573 | 1321492 | − | 639 | | Predicted P-loop ATPase | | |
| 1309 | 1322642 | 1323265 | + | 207 | | Uncharacterized protein specific for | | |
| | | | | | | M. kandleri, MK-1 family | | |
| 1310 | 1324335 | 1324640 | − | 101 | | Uncharacterized protein predicted to | COG1343 | [L] |
| | | | | | | be involved in DNA repair | | |
| 1311 | 1324652 | 1326787 | − | 711 | | Homolog of the eukaryotic argonaute | COG1431 | [J] |
| | | | | | | protein, implicated in translation or | | |
| | | | | | | RNA processing | | |
| 1312 | 1326771 | 1327766 | − | 331 | | Uncharacterized protein predicted to | COG1518 | [L] |
| | | | | | | be involved in DNA repair | | |
| 1313 | 1329452 | 1330918 | − | 488 | | Uncharacterized domain specific for | | |
| | | | | | | M. kandleri, MK-11 family | | |
| 1314 | 1331274 | 1334015 | + | 913 | | Predicted DNA-dependent DNA | COG1353 | [R] |
| | | | | | | polymerase, component of a | | |
| | | | | | | thermophile-specific DNA repair | | |
| | | | | | | system | | |
| 1315 | 1334017 | 1334541 | + | 174 | | Uncharacterized protein predicted to | COG1421 | [L] |
| | | | | | | be involved in DNA repair | | |
| 1316 | 1334554 | 1335609 | + | 351 | | Predicted component of a | COG1337 | [L] |
| | | | | | | thermophile-specific DNA repair | | |
| | | | | | | system, contains a RAMP domain | | |
| 1317 | 1335611 | 1336702 | + | 363 | | Uncharacterized protein | | |
| 1318 | 1336699 | 1338027 | + | 442 | | Uncharacterized protein | | |
| 1319 | 1338024 | 1339115 | + | 363 | | Predicted component of a | | |
| | | | | | | thermophile-specific DNA repair | | |
| | | | | | | system, contains a RAMP domain | | |
| 1320 | 1339214 | 1339987 | + | 257 | | Predicted xylanase/chitin | COG0726 | [G] |
| | | | | | | deacetylase family enzyme | | |
| 1321 | 1340038 | 1340202 | + | 54 | | Uncharacterized protein | | |
| 1322 | 1340374 | 1340895 | + | 173 | | Predicted membrane protein | | |
| 1323 | 1340890 | 1341540 | − | 216 | | Metal-dependent hydrolase of the | COG1237 | [R] |
| | | | | | | beta-lactamase superfamily | | |
| 1324 | 1342074 | 1342703 | + | 209 | | Uncharacterized membrane protein | | |
| | | | | | | specific for M. kandleri, MK-31 family | | |
| 1325 | 1342985 | 1343332 | + | 115 | | Predicted regulator of Ras-like | COG2018 | [R] |
| | | | | | | GTPase activity, member of the | | |
| | | | | | | Roadblock/LC7/MgIB family | | |
| 1326 | 1344045 | 1344728 | + | 227 | | Uncharacterized domain specific for | | |
| | | | | | | M. kandleri, MK-12 family | | |
| 1327 | 1344701 | 1345228 | + | 175 | | Uncharacterized domain specific for | | |
| | | | | | | M. kandleri, MK-12 family | | |
| 1328 | 1345308 | 1345556 | − | 82 | | Uncharacterized protein | | |
| 1329 | 1345608 | 1346639 | − | 343 | | Uncharacterized protein specific for | | |
| | | | | | | M. kandleri, MK-32 family | | |
| 1330 | 1346857 | 1349094 | − | 745 | | Predicted membrane protein | | |
| 1331 | 1349240 | 1350568 | − | 442 | | Uncharacterized domain specific for | | |
| | | | | | | M. kandleri, MK-11 family | | |
| 1332 | 1351003 | 1351692 | + | 229 | | Uncharacterized protein | | |
| 1333 | 1351717 | 1352718 | + | 333 | | Uncharacterized domain specific for | | |
| | | | | | | M. kandleri, MK-2 family | | |
| 1334 | 1352753 | 1353799 | − | 348 | | Predicted membrane-bound metal- | COG1988 | [R] |
| | | | | | | dependent hydrolase | | |
| 1335 | 1353804 | 1354355 | − | 183 | | Zn-dependent hydrolase | COG0491 | [R] |
| 1336 | 1354689 | 1355963 | − | 424 | | Uncharacterized protein specific for | | |
| | | | | | | M. kandleri, MK-42 family | | |
| 1337 | 1356271 | 1356459 | − | 62 | | Uncharacterized protein | | |
| 1338 | 1356793 | 1357287 | − | 164 | | Uncharacterized protein | | |
| 1339 | 1357826 | 1360414 | − | 862 | | Uncharacterized protein specific for | | |
| | | | | | | M. kandleri, contains two domains of | | |
| | | | | | | the MK-3 family | | |
| 1340 | 1360653 | 1361492 | + | 279 | | Uncharacterized protein | | |
| 1341 | 1361489 | 1361719 | + | 76 | | Uncharacterized protein | | |
| 1342 | 1361829 | 1362332 | + | 167 | | Uncharacterized membrane protein | | |
| | | | | | | specific for M. kandleri, MK-31 family | | |
| 1343 | 1364466 | 1365077 | + | 203 | | Uncharacterized protein specific for | | |
| | | | | | | M. kandleri, MK-1 family | | |
| 1344 | 1365140 | 1366013 | + | 290 | | Uncharacterized domain specific for | | |
| | | | | | | M. kandleri, MK-34 family, a fragment | | |
| 1345 | 1366319 | 1367176 | − | 285 | | Fe—S oxidoreductase | COG0535 | [R] |
| 1346 | 1367297 | 1368256 | − | 319 | | Uncharacterized secreted protein | | |
| | | | | | | specific for M. kandleri, MK-3 family | | |
| 1347 | 1368270 | 1368527 | − | 85 | | Uncharacterized protein | | |
| 1348 | 1369122 | 1369865 | − | 247 | | Uncharacterized domain specific for | | |
| | | | | | | M. kandleri, MK-2 family | | |
| 1349 | 1369858 | 1370589 | − | 243 | | Uncharacterized domain specific for | | |
| | | | | | | M. kandleri, MK-2 family | | |
| 1350 | 1370729 | 1371478 | − | 249 | | Predicted cysteine protease of the | COG1305 | [E] |
| | | | | | | transglutaminase-like superfamily | | |
| 1351 | 1371767 | 1375339 | − | 1190 | | Predicted protein of CobN/Mg- | COG1429 | [H] |
| | | | | | | chelatase family | | |
| 1352 | 1375488 | 1376102 | + | 204 | | Uncharacterized protein specific for | | |
| | | | | | | M. kandleri, MK-35 family | | |
| 1353 | 1376114 | 1376947 | + | 277 | | Uncharacterized protein specific for | | |
| | | | | | | M. kandleri, MK-45 family | | |
| 1354 | 1376796 | 1377713 | + | 305 | | Uncharacterized membrane protein | | |
| | | | | | | specific for M. kandleri, MK-10 family | | |
| 1355 | 1378052 | 1378888 | + | 278 | | Uncharacterized membrane protein | | |
| | | | | | | specific for M. kandleri, MK-10 family | | |
| 1356 | 1379071 | 1380000 | + | 309 | | Uncharacterized membrane protein | | |
| | | | | | | specific for M. kandleri, MK-10 family | | |
| 1357 | 1380143 | 1380862 | + | 239 | | Uncharacterized membrane protein | | |
| | | | | | | specific for M. kandleri, MK-10 family | | |
| 1358 | 1381069 | 1381686 | + | 205 | | Putative component of a threonine | COG1280 | [E] |
| | | | | | | efflux system | | |
| 1359 | 1381905 | 1382150 | − | 81 | | Uncharacterized protein | | |
| 1360 | 1382453 | 1383180 | + | 242 | | Uncharacterized membrane protein | | |
| | | | | | | specific for M. kandleri, MK-10 family, | | |
| | | | | | | a fragment | | |
| 1361 | 1384064 | 1385821 | + | 585 | | Calcineurin superfamily phosphatase | | |
| | | | | | | or nuclease | | |
| 1362 | 1385837 | 1386457 | − | 206 | Nth_2 | A/G-specific DNA glycosylase | COG0177 | [L] |
| 1363 | 1387524 | 1389643 | + | 706 | | Predicted membrane protein | | |
| | | | | | | specific for M. kandleri, MK-13 family, | | |
| | | | | | | a frameshift | | |
| 1364 | 1389932 | 1392763 | + | 943 | LeuS | Leucyl-tRNA synthetase | COG0495 | [J] |
| 1365 | 1392767 | 1393741 | − | 324 | HmdII | N5,N10- | COG4007 | [R] |
| | | | | | | methylenetetrahydromethanopterin | | |
| | | | | | | dehydrogenase (H2-forming) | | |
| 1366 | 1393825 | 1395282 | − | 485 | CCA1 | tRNA nucleotidyltransferase (CCA- | COG1746 | [J] |
| | | | | | | adding enzyme) | | |
| 1367 | 1395443 | 1396009 | − | 188 | LigT | 2′-5′ RNA ligase | COG1514 | [J] |
| 1368 | 1396144 | 1397154 | + | 336 | | Predicted ATPase of the AAA+ class | COG1223 | [R] |
| 1369 | 1397219 | 1398223 | − | 334 | SelD | Selenophosphate synthase | COG0709 | [E] |
| 1370 | 1398408 | 1399037 | − | 209 | ThyA | Thymidylate synthase | COG0207 | [F] |
| 1371 | 1399129 | 1400016 | − | 295 | SNZ1 | Pyridoxine biosynthesis enzyme | COG0214 | [H] |
| 1372 | 1400084 | 1400647 | + | 187 | | Small, Ras-like GTPase | COG2229 | [R] |
| 1373 | 1400669 | 1401601 | + | 310 | | Uncharacterized protein | | |
| 1374 | 1401670 | 1402089 | + | 139 | | Uncharacterized protein | | |
| 1375 | 1402137 | 1402895 | + | 252 | CobM | Precorrin-4 methylase | COG2875 | [H] |
| 1376 | 1403490 | 1404254 | + | 254 | CobJ | Precorrin-3B methylase | COG1010 | [H] |
| 1377 | 1404218 | 1404622 | − | 134 | | Predicted nucleic-acid-binding | COG1545 | [R] |
| | | | | | | protein containing a Zn-ribbon | | |
| 1378 | 1404635 | 1405819 | − | 394 | | Acetyl-CoA acetyltransferase | COG0183 | [I] |
| 1379 | 1405824 | 1406876 | − | 350 | PksG | 3-hydroxy-3-methylglutaryl CoA | COG3425 | [I] |
| | | | | | | synthase | | |
| 1380 | 1406873 | 1407622 | − | 249 | | Predicted transcriptional regulator | COG1709 | [K] |
| | | | | | | containing a DNA-binding HTH | | |
| | | | | | | domain | | |
| 1381 | 1407623 | 1409290 | + | 555 | | Glycosyltransferase involved in cell | COG0463 | [M] |
| | | | | | | wall biogenesis | | |
| 1382 | 1409287 | 1410831 | + | 514 | | Fe—S oxidoreductase | COG1032 | [C] |
| 1383 | 1410810 | 1411397 | − | 195 | | Uncharacterized membrane protein | COG1814 | [S] |
| 1384 | 1411404 | 1411694 | − | 96 | | Uncharacterized protein conserved | COG1888 | [S] |
| | | | | | | in archaea | | |
| 1385 | 1411726 | 1412775 | + | 349 | NifD | Nitrogenase molybdenum-iron | COG2710 | [C] |
| | | | | | | subunit | | |
| 1386 | 1412760 | 1413503 | − | 247 | CitT | Di- and tricarboxylate transporter | COG0471 | [P] |
| 1387 | 1413918 | 1414901 | + | 327 | | Predicted integral membrane protein | COG0392 | [S] |
| 1388 | 1414907 | 1415602 | + | 231 | | Predicted ICC-like | COG1407 | [R] |
| | | | | | | phosphoesterases | | |
| 1389 | 1415734 | 1416798 | + | 354 | Asd | Aspartate-semialdehyde | COG0136 | [E] |
| 1390 | 1416789 | 1417262 | − | 157 | | Predicted Rossmann fold nucleotide- | COG1611 | [R] |
| | | | | | | binding protein | | |
| 1391 | 1417522 | 1418286 | + | 254 | TrpC | Indole-3-glycerol phosphate | COG0134 | [E] |
| | | | | | | synthase | | |
| 1392 | 1418283 | 1419104 | + | 273 | | Uncharacterized domain specific for | | |
| | | | | | | M. kandleri, MK-33 family | | |
| 1393 | 1419288 | 1419860 | − | 190 | | Uncharacterized protein conserved | COG4073 | [S] |
| | | | | | | in archaea | | |
| 1394 | 1419851 | 1421071 | + | 406 | PRI2 | Eukaryotic-type DNA primase, large | COG2219 | [L] |
| | | | | | | subunit | | |
| 1395 | 1421041 | 1421427 | − | 128 | | Zn-ribbon-containing protein | | |
| 1396 | 1421429 | 1422007 | − | 192 | | Uncharacterized protein | | |
| 1397 | 1422004 | 1422678 | − | 224 | RibB | 3,4-dihydroxy-2-butanone 4- | COG0108 | [H] |
| | | | | | | phosphate synthase | | |
| 1398 | 1422654 | 1423097 | − | 147 | | Transcriptional regulator of the | COG1339 | [K] |
| | | | | | | riboflavin/FAD biosynthetic operon | | |
| 1399 | 1423066 | 1423941 | − | 291 | RIO1_2 | Serine/threonine protein kinase | COG1718 | [TD] |
| | | | | | | involved in cell cycle control | | |
| 1400 | 1424001 | 1425185 | − | 394 | PncB | Nicotinic acid | COG1488 | [H] |
| | | | | | | phosphoribosyltransferase | | |
| 1401 | 1425410 | 1425775 | + | 121 | | Predicted metal-binding protein | | |
| 1402 | 1426225 | 1426971 | − | 248 | | Uncharacterized protein | | |
| 1403 | 1426968 | 1428236 | − | 422 | | Predicted P-loop ATPase | | |
| 1404 | 1428233 | 1429309 | − | 358 | | Translation elongation factor, | COG0050 | [J] |
| | | | | | | GTPase | | |
| 1405 | 1429356 | 1435184 | − | 1942 | | Predicted protein of the CobN/Mg- | COG1429 | [H] |
| | | | | | | chelatase family | | |
| 1406 | 1435198 | 1436574 | − | 458 | | Terpene cyclase/mutase family | COG1657 | [I] |
| | | | | | | protein | | |
| 1407 | 1436627 | 1437628 | − | 333 | | Predicted permease | COG0701 | [R] |
| 1408 | 1437721 | 1438929 | − | 402 | | Predicted alternative 3- | COG1465 | [E] |
| | | | | | | dehydroquinate synthase | | |
| 1409 | 1438936 | 1439748 | − | 270 | FbaB | Fructose-1,6-bisphosphate aldolase | COG1830 | [G] |
| | | | | | | of the DhnA family | | |
| 1410 | 1439755 | 1440072 | − | 105 | | Uncharacterized protein conserved | COG3388 | [S] |
| | | | | | | in archaea | | |
| 1411 | 1440119 | 1441096 | − | 325 | | Predicted ornithine cyclodeaminase, | COG2423 | [E] |
| | | | | | | mu-crystallin homolog | | |
| 1412 | 1441454 | 1442305 | + | 283 | Kch_2 | NAD-binding subunit of the Kef-type | COG1226 & | [P][R] |
| | | | | | | K+ transport systems, | COG1827 | |
| 1413 | 1442302 | 1442811 | − | 169 | | Uncharacterized protein | | |
| 1414 | 1442838 | 1444322 | + | 494 | CobQ | Cobyric acid synthase | COG1492 | [H] |
| 1415 | 1444325 | 1444906 | + | 193 | | Predicted SAM-dependent | COG2519 | [J] |
| | | | | | | methyltransferase involved in tRNA- | | |
| | | | | | | Met maturation | | |
| 1416 | 1444991 | 1445791 | − | 266 | NifH | Nitrogenase subunit NifH (ATPase) | COG1348 | [P] |
| 1417 | 1445815 | 1446627 | + | 270 | | Uncharacterized secreted protein | COG4086 | [S] |
| 1418 | 1446749 | 1447603 | + | 284 | NadE | NAD synthase | COG0171 | [H] |
| 1419 | 1447622 | 1447993 | + | 123 | | Uncharacterized protein | | |
| 1420 | 1447990 | 1448730 | + | 246 | | Uncharacterized protein | | |
| 1421 | 1448743 | 1449780 | + | 345 | | Uncharacterized protein | | |
| 1422 | 1449777 | 1450604 | + | 275 | DapB | Dihydrodipicolinate reductase | COG0289 | [E] |
| 1423 | 1450639 | 1451508 | + | 289 | | Uncharacterized protein | | |
| 1424 | 1452087 | 1454831 | − | 914 | ValS | Valyl-tRNA synthetase | COG0525 | [J] |
| 1425 | 1454880 | 1455605 | + | 241 | | Predicted membrane protein | COG4089 | [S] |
| | | | | | | conserved in archaea | | |
| 1426 | 1455566 | 1456741 | + | 391 | HisC | Histidinol-phosphate/tyrosine | COG0079 | [E] |
| | | | | | | aminotransferase | | |
| 1427 | 1456817 | 1457656 | − | 279 | | Fe—S oxidoreductase | COG0535 | [R] |
| 1428 | 1457683 | 1458321 | + | 212 | CobL_2 | Precorrin-6B methylase | COG2241 | [H] |
| 1429 | 1458332 | 1459861 | + | 509 | | Fe—S oxidoreductase | COG1032 | [C] |
| 1430 | 1459862 | 1460179 | + | 105 | ModE | N-terminal domain of molybdenum- | COG2005 | [R] |
| | | | | | | binding protein | | |
| 1431 | 1460163 | 1460975 | − | 270 | | Predicted calcineurin superfamily | COG1409 | [R] |
| | | | | | | phosphohydrolase | | |
| 1432 | 1460972 | 1461496 | − | 174 | | Transcription factor homologous to | COG4008 | [K] |
| | | | | | | NACalpha-BTF3 fused to metal- | | |
| | | | | | | binding domain | | |
| 1433 | 1461502 | 1463100 | − | 532 | | ATPase subunit of an ABC-type | COG1123 | [R] |
| | | | | | | transport system, contain duplicated | | |
| | | | | | | ATPase | | |
| 1434 | 1463176 | 1463880 | + | 234 | KptA | RNA:NAD 2′-phosphotransferase | COG1859 | [J] |
| 1435 | 1463867 | 1464556 | + | 229 | Nfi | Deoxyinosine 3′endonuclease | COG1515 | [L] |
| | | | | | | (endonuclease V) | | |
| 1436 | 1464534 | 1467488 | + | 984 | Top5 | Topoisomerase V | | |
| 1437 | 1467491 | 1468675 | − | 394 | CsdB | Selenocysteine lyase | COG0520 | [E] |
| 1438 | 1468781 | 1469572 | − | 263 | | Predicted RNA methylase | COG2263 | [J] |
| 1439 | 1469870 | 1472335 | + | 821 | | Uncharacterized membrane protein | | |
| | | | | | | specific for M. kandleri, MK-13 family | | |
| 1440 | 1472310 | 1473566 | − | 418 | LeuC_1 | 3-isopropylmalate dehydratase large | COG0065 | [E] |
| | | | | | | subunit | | |
| 1441 | 1473643 | 1474941 | + | 432 | | Replication factor A (ssDNA-binding | COG1599 | [L] |
| | | | | | | protein) | | |
| 1442 | 1474919 | 1475872 | + | 317 | RadA_2 | RadA recombinase | COG0468 | [L] |
| 1443 | 1475944 | 1477071 | + | 375 | | Dehydrogenase (flavoprotein) | COG0644 | [C] |
| 1444 | 1477068 | 1477274 | − | 68 | RPL24A | Ribosomal protein L24E | COG2075 | [J] |
| 1445 | 1477287 | 1477511 | − | 74 | RPS28A | Ribosomal protein S28E/S33 | COG2053 | [J] |
| 1446 | 1477629 | 1478021 | + | 130 | RPS6A | Ribosomal protein S6E (S10) | COG2125 | [J] |
| 1447 | 1478058 | 1479296 | + | 412 | | Translation initiation factor 2, gamma | COG5257 | [J] |
| | | | | | | subunit (elF-2gamma; GTPase) | | |
| 1448 | 1479303 | 1479695 | + | 130 | | Predicted RNA-binding protein | COG1412 | [R] |
| | | | | | | containing PIN domain | | |
| 1449 | 1479700 | 1480290 | + | 196 | MenG | Demethylmenaquinone | COG0684 | [H] |
| | | | | | | methyltransferase | | |
| 1450 | 1480295 | 1480825 | + | 176 | Ppa | Inorganic pyrophosphatase | COG0221 | [C] |
| 1451 | 1480832 | 1481383 | + | 183 | RpoE1 | DNA-directed RNA polymerase | COG1095 | [K] |
| | | | | | | subunit E′ | | |
| 1452 | 1481625 | 1481819 | + | 64 | RpoE2 | DNA-directed RNA polymerase | COG2093 | [K] |
| | | | | | | subunit E″ | | |
| 1453 | 1481816 | 1482391 | + | 191 | | Uncharacterized protein conserved | COG1909 | [S] |
| | | | | | | in archaea | | |
| 1454 | 1482334 | 1482684 | + | 116 | RPS24A | Ribosomal protein S24E | COG2004 | [J] |
| 1455 | 1482704 | 1482883 | + | 60 | RPS31 | Ribosomal protein S27AE | COG1998 | [J] |
| 1456 | 1482941 | 1483564 | + | 206 | | Mn2+-dependent serine/threonine | COG3642 | [T] |
| | | | | | | protein kinase | | |
| 1457 | 1483561 | 1484421 | − | 286 | | Uncharacterized protein | | |
| 1458 | 1484461 | 1485501 | + | 346 | QRI7 | O-sialoglycoprotein endopeptidase | COG0533 | [O] |
| 1459 | 1485851 | 1486678 | + | 275 | | Uncharacterized protein | | |
| 1460 | 1486724 | 1488307 | + | 527 | SerS | Seryl-tRNA synthetase | COG0172 | [J] |
| 1461 | 1488365 | 1489000 | + | 211 | RPS1A | Ribosomal protein S3AE | COG1890 | [J] |
| 1462 | 1489038 | 1490084 | + | 348 | | Predicted RNA-binding protein, | COG1818 | [R] |
| | | | | | | contains THUMP domain | | |
| 1463 | 1490418 | 1491233 | + | 271 | | Predicted TIM-barrel enzyme | COG0434 | [R] |
| 1464 | 1491224 | 1491904 | + | 226 | | Predicted nucleotidyltransferase of | COG2413 | [R] |
| | | | | | | the DNA polymerase beta | | |
| | | | | | | superfamily | | |
| 1465 | 1491877 | 1492431 | − | 184 | UbiX | 3-polyprenyl-4-hydroxybenzoate | COG0163 | [H] |
| | | | | | | decarboxylase | | |
| 1466 | 1492501 | 1493112 | − | 203 | | Uncharacterized membrane protein | | |
| 1467 | 1493235 | 1493510 | + | 91 | | Uncharacterized protein conserved | COG4009 | [S] |
| | | | | | | in archaea | | |
| 1468 | 1493507 | 1494061 | + | 184 | | Uncharacterized protein conserved | COG4010 | [S] |
| | | | | | | in archaea | | |
| 1469 | 1494113 | 1494733 | + | 206 | | Predicted phosphoesterases, related | COG2129 | [R] |
| | | | | | | to the lcc protein | | |
| 1470 | 1494730 | 1495332 | + | 200 | | Predicted HD superfamily hydrolase | COG1418 | [R] |
| 1471 | 1495427 | 1495882 | + | 151 | RpsM | Ribosomal protein S13 | COG0099 | [J] |
| 1472 | 1495896 | 1496456 | + | 186 | RpsD | Ribosomal protein related to S4 | COG0522 | [J] |
| 1473 | 1496474 | 1496887 | + | 137 | RpsK | Ribosomal protein S11 | COG0100 | [J] |
| 1474 | 1496884 | 1497711 | + | 275 | RpoA | DNA-directed RNA polymerase | COG0202 | [K] |
| | | | | | | alpha subunit | | |
| 1475 | 1497708 | 1498091 | + | 127 | RPL18A | Ribosomal protein L18E | COG1727 | [J] |
| 1476 | 1498106 | 1498585 | + | 159 | RplM | Ribosomal protein L13 | COG0102 | [J] |
| 1477 | 1498586 | 1498990 | + | 134 | RpsI | Ribosomal protein S9 | COG0103 | [J] |
| 1478 | 1499006 | 1499224 | + | 72 | RPB10 | DNA-directed RNA polymerase, | COG1644 | [K] |
| | | | | | | subunit N | | |
| 1479 | 1499506 | 1500867 | + | 453 | | Uncharacterized protein specific for | | |
| | | | | | | M. kandleri, MK-39 family | | |
| 1480 | 1501160 | 1502089 | + | 309 | PyrB | Aspartate carbamoyltransferase, | COG0540 | [F] |
| | | | | | | catalytic subunit | | |
| 1481 | 1502086 | 1502556 | + | 156 | PyrI | Aspartate carbamoyltransferase, | COG1781 | [F] |
| | | | | | | regulatory subunit | | |
| 1482 | 1502646 | 1503560 | + | 304 | | Transcriptional regulator of the LysR | COG0583 | [K] |
| | | | | | | family | | |
| 1483 | 1504035 | 1505579 | − | 514 | FolP | Dihydropteroate synthase | COG0294 | [H] |
| 1484 | 1505554 | 1506294 | − | 246 | | Archaea-specific flavoprotein | COG1036 | [C] |
| 1485 | 1506320 | 1506547 | − | 75 | MtrF | N5-methyl- | COG4218 | [H] |
| | | | | | | tetrahydromethanopterin:coenzyme | | |
| | | | | | | M methyltransferase, subunit F | | |
| 1486 | 1506670 | 1507077 | − | 135 | | Uncharacterized conserved protein | COG1786 | [S] |
| 1487 | 1507201 | 1507398 | − | 65 | MrtA | Methyl coenzyme M reductase, | COG4058 | [H] |
| | | | | | | alpha subunit, fragment | | |
| 1488 | 1507688 | 1508737 | + | 349 | | Fe—S oxidoreductase, related to | COG1625 | [C] |
| | | | | | | NifB/MoaA family | | |
| 1489 | 1508860 | 1509792 | + | 310 | CofD | 2-phospho-L-lactate transferase | COG0391 | [S] |
| 1490 | 1509797 | 1510498 | + | 233 | NfnB | Nitroreductase | COG0778 | [C] |
| 1491 | 1510584 | 1511174 | + | 196 | | Methylase of polypeptide chain | COG2890 | [J] |
| | | | | | | release factors | | |
| 1492 | 1511252 | 1511560 | + | 102 | CutA | Uncharacterized protein involved in | COG1324 | [P] |
| | | | | | | tolerance to divalent cations | | |
| 1493 | 1511580 | 1512938 | − | 452 | HypE_1 | Hydrogenase maturation factor | COG1973 | [O] |
| 1494 | 1513509 | 1513742 | + | 77 | | Uncharacterized protein specific for | | |
| | | | | | | M. kandleri, MK-20 family | | |
| 1495 | 1513859 | 1514368 | − | 169 | CysG_1 | Siroheme synthase (precorrin-2 | COG1648 | [H] |
| | | | | | | oxidase/ferrochelatase domain) | | |
| 1496 | 1514479 | 1515249 | − | 256 | | Uncharacterized protein | | |
| 1497 | 1515253 | 1516320 | − | 355 | | Uncharacterized protein conserved | COG4012 | [S] |
| | | | | | | in archaea | | |
| 1498 | 1516295 | 1516912 | − | 205 | | Archaea-specific kinase related to | COG2054 | [R] |
| | | | | | | aspartokinase | | |
| 1499 | 1517027 | 1517572 | − | 181 | HyaD_1 | Ni,Fe-hydrogenase maturation factor | COG0680 | [C] |
| 1500 | 1517569 | 1518687 | − | 372 | | Pyridoxal-phosphate-dependent | COG0076 | [E] |
| | | | | | | enzyme related to glutamate | | |
| | | | | | | decarboxylase | | |
| 1501 | 1518684 | 1519490 | − | 268 | | Predicted transcriptional regulator | COG1497 | [K] |
| | | | | | | containing a DNA-binding HTH | | |
| | | | | | | domain | | |
| 1502 | 1519494 | 1519919 | − | 141 | | Predicted transcriptional regulator | COG0864 | [K] |
| | | | | | | containing the CopG/Arc/MetJ DNA- | | |
| | | | | | | binding domain and a 3H domain | | |
| 1503 | 1519963 | 1520475 | − | 170 | | Uncharacterized conserved protein | COG1986 | [S] |
| 1504 | 1520450 | 1520923 | − | 157 | | Predicted nucleotidyltransferase of | COG1019 | [R] |
| | | | | | | the HIGH superfamily | | |
| 1505 | 1520920 | 1521717 | − | 265 | | Predicted ATPase of the PP-loop | COG1365 | [R] |
| | | | | | | superfamily | | |
| 1506 | 1521830 | 1522651 | − | 273 | | Uncharacterized conserved protein | COG1430 | [S] |
| 1507 | 1522677 | 1523396 | + | 239 | | Uncharacterized conserved protein | COG1624 | [S] |
| 1508 | 1523389 | 1524582 | + | 397 | | Archaeal S-adenosylmethionine | COG1812 | [E] |
| | | | | | | synthetase | | |
| 1509 | 1524636 | 1526012 | − | 458 | AnsB | L-asparaginase | COG0252 | [EJ] |
| 1510 | 1526044 | 1526646 | + | 200 | HisH | Glutamine amidotransferase | COG0118 | [E] |
| 1511 | 1526643 | 1527143 | + | 166 | | Predicted metabolic regulator | COG1719 | [R] |
| | | | | | | containing V4R domain | | |
| 1512 | 1527145 | 1527771 | + | 208 | | Predicted serine protein kinase | COG1493 | [T] |
| | | | | | | homologous to HPr protein kinase, | | |
| | | | | | | contains a Zn-ribbon | | |
| 1513 | 1527775 | 1528134 | + | 119 | | Uncharacterized protein conserved | | |
| | | | | | | in archaea | | |
| 1514 | 1528140 | 1528403 | + | 87 | | Uncharacterized conserved protein | COG1873 | [S] |
| 1515 | 1528916 | 1529248 | + | 110 | | Predicted transcriptional regulator of | COG0640 | [K] |
| | | | | | | the ArsR family | | |
| 1516 | 1529214 | 1530110 | − | 298 | CbiB | Cobalamin biosynthesis protein | COG1270 | [H] |
| | | | | | | CobD/CbiB | | |
| 1517 | 1530110 | 1531141 | − | 343 | DPH2 | Diphthamide synthase subunit DPH2 | COG1736 | [J] |
| 1518 | 1531169 | 1531531 | + | 120 | CbiG | Cobalamin biosynthesis protein CbiG | COG2073 | [H] |
| 1519 | 1531570 | 1532046 | + | 158 | | Uncharacterized protein conserved | | |
| | | | | | | in archaea | | |
| 1520 | 1532641 | 1533588 | − | 315 | Dcm | Site-specific DNA methylase | COG0270 | [L] |
| 1521 | 1533710 | 1534465 | + | 251 | | ABC-type molybdate transport | COG0725 | [P] |
| | | | | | | system, periplasmic component | | |
| 1522 | 1534462 | 1535247 | + | 261 | | ABC-type molybdate transport | COG0555 | [O] |
| | | | | | | systems, permease component | | |
| 1523 | 1535234 | 1535920 | + | 228 | | ABC-type molibdate transport | COG3839 | [G] |
| | | | | | | systems, ATPase component | | |
| 1524 | 1535907 | 1537154 | + | 415 | MoeA | Molybdopterin biosynthesis enzyme | COG0303 | [H] |
| 1525 | 1537248 | 1537487 | + | 79 | FwdG | Ferredoxin | COG1145 | [C] |
| 1526 | 1537502 | 1537897 | + | 131 | FwdD | Formylmethanofuran dehydrogenase | COG1153 | [C] |
| | | | | | | subunit D | | |
| 1527 | 1537981 | 1539282 | + | 433 | FwdB_2 | Formylmethanofuran dehydrogenase | COG1029 | [C] |
| | | | | | | subunit B, selenocysteine containing | | |
| 1528 | 1539400 | 1539711 | + | 103 | | Zn-ribbon-containing protein | | |
| 1529 | 1539750 | 1541495 | + | 581 | FwdA | Formylmethanofuran dehydrogenase | COG1229 | [C] |
| | | | | | | subunit A | | |
| 1530 | 1541523 | 1542326 | + | 267 | FwdC | Formylmethanofuran dehydrogenase | COG2218 | [C] |
| | | | | | | subunit C | | |
| 1531 | 1542396 | 1542695 | + | 99 | | Uncharacterized protein conserved | COG4013 | [S] |
| | | | | | | in archaea | | |
| 1532 | 1542781 | 1544628 | + | 615 | | Predicted secreted protein | | |
| 1533 | 1544563 | 1546239 | − | 558 | | Squalene cyclase | COG1657 | [I] |
| 1534 | 1546215 | 1551530 | + | 1771 | | Predicted protein of the CobN/Mg- | COG1429 | [H] |
| | | | | | | chelatase family | | |
| 1535 | 1551496 | 1552785 | − | 429 | | Aspartokinase | COG0527 | [E] |
| 1536 | 1552958 | 1554892 | − | 644 | | P-loop ATPase of the PilT family | COG1855 | [R] |
| 1537 | 1554926 | 1555351 | − | 141 | HisI_2 | Phosphoribosyl-AMP cyclohydrolase | COG0139 | [E] |
| 1538 | 1555348 | 1556613 | − | 421 | HisS | Histidyl-tRNA synthetase | COG0124 | [J] |
| 1539 | 1556613 | 1557965 | − | 450 | | tRNA/rRNA cytosine-C5-methylase | COG0144 | [J] |
| 1540 | 1557946 | 1558869 | − | 307 | MoaA | Molybdenum cofactor biosynthesis | COG2896 | [H] |
| | | | | | | enzyme | | |
| 1541 | 1558896 | 1559870 | − | 324 | | Uncharacterized protein conserved | | |
| | | | | | | in archaea | | |
| 1542 | 1560542 | 1561234 | + | 230 | | Predicted Zn-dependent hydrolase of | COG2220 | [R] |
| | | | | | | the beta-lactamase superfamily | | |
| 1543 | 1561292 | 1562038 | − | 248 | | Uncharacterized membrane protein | | |
| 1544 | 1562041 | 1563039 | − | 332 | HypE_2 | Hydrogenase maturation factor | COG0309 | [O] |
| 1545 | 1563101 | 1563502 | + | 133 | RPS8A | Ribosomal protein S8E | COG2007 | [J] |
| 1546 | 1563499 | 1564155 | − | 218 | HypB_2 | Ni2+-binding GTPase involved in | COG0378 | [OK] |
| | | | | | | regulation of expression and | | |
| | | | | | | maturation of hydrogenase | | |
| 1547 | 1564142 | 1564570 | − | 142 | HybF | Zn-finger-containing protein | COG0375 | [R] |
| | | | | | | HypA/HybF (possibly regulating | | |
| | | | | | | hydrogenase expression) | | |
| 1548 | 1564629 | 1565369 | + | 246 | CysG_2 | Uroporphyrinogen-III methylase | COG0007 | [H] |
| 1549 | 1565366 | 1566509 | + | 380 | Kch_3 | NAD-binding domain of the Kef-type | COG1226 & | [P][R] |
| | | | | | | K+ transport system fused to a | COG1827 | |
| | | | | | | uncharacterized conserved domain | | |
| 1550 | 1566513 | 1567199 | − | 228 | HemD | Uroporphyrinogen-III synthase | COG1587 | [H] |
| 1551 | 1567196 | 1567507 | − | 103 | SEC65 | 19 kDa subunit of the signal | COG1400 | [U] |
| | | | | | | recognition particle | | |
| 1552 | 1567473 | 1568744 | − | 423 | | Uncharacterized protein specific for | | |
| | | | | | | M. kandleri, MK-38 family | | |
| 1553 | 1568769 | 1569284 | + | 171 | | Predicted allosteric regulator of | COG2061 | [E] |
| | | | | | | homoserine dehydrogenase | | |
| | | | | | | containing an ACT domain | | |
| 1554 | 1569260 | 1570273 | + | 337 | ThrA | Homoserine dehydrogenase | COG0460 | [E] |
| 1555 | 1570324 | 1570851 | − | 175 | | Uncharacterized protein | | |
| 1556 | 1570848 | 1571285 | − | 145 | | Uncharacterized membrane protein | | |
| 1557 | 1571504 | 1571908 | − | 134 | | Predicted redox protein, regulator of | COG1765 | [O] |
| | | | | | | disulfide bond formation | | |
| 1558 | 1571926 | 1572834 | − | 302 | | Selenophosphate synthetase-related | COG2144 | [R] |
| | | | | | | enzyme | | |
| 1559 | 1572806 | 1573468 | − | 220 | | Uncharacterized protein | | |
| 1560 | 1573487 | 1574383 | + | 298 | | Predicted permease | COG0679 | [R] |
| 1561 | 1574882 | 1575780 | − | 299 | TrxB | Thioredoxin reductase | COG0492 | [O] |
| 1562 | 1575813 | 1576907 | − | 364 | | Predicted flavoprotein related to | COG2303 | [E] |
| | | | | | | choline dehydrogenase | | |
| 1563 | 1576935 | 1577945 | + | 336 | | Uncharacterized protein | | |
| 1564 | 1577960 | 1580194 | + | 744 | InfB_1 | Translation initiation factor 2, | COG0532 | [J] |
| | | | | | | GTPase | | |
| 1565 | 1580201 | 1580878 | + | 225 | | Uncharacterized protein | | |
| 1566 | 1580875 | 1581339 | + | 154 | Dcd_2 | Deoxycytidine deaminase | COG0717 | [F] |
| 1567 | 1581336 | 1581887 | + | 183 | | Zn-dependent hydrolase | COG0491 | [R] |
| 1568 | 1581884 | 1582210 | − | 108 | | Predicted metal-binding protein | | |
| 1569 | 1582270 | 1583277 | + | 335 | | Permease of the major facilitator | COG0477 | [GEPR] |
| | | | | | | superfamily | | |
| 1570 | 1583274 | 1584155 | + | 293 | MMT1 | Predicted Co/Zn/Cd cation | COG0053 | [P] |
| | | | | | | transporter | | |
| 1571 | 1584185 | 1585000 | − | 271 | | Uncharacterized protein | | |
| 1572 | 1584936 | 1585493 | + | 185 | | Uncharacterized protein | | |
| 1573 | 1585777 | 1587114 | + | 445 | CobB_1 | Cobyrinic acid a,c-diamide synthase | COG1797 | [H] |
| 1574 | 1587128 | 1587742 | + | 204 | | Metal-dependent hydrolase of the | COG1237 | [R] |
| | | | | | | beta-lactamase superfamily | | |
| 1575 | 1587924 | 1589219 | − | 431 | | tRNA/rRNA cytosine-C5-methylase | COG0144 | [J] |
| 1576 | 1589278 | 1590753 | − | 491 | | Amino acid transporter | COG0531 | [E] |
| 1577 | 1590858 | 1591445 | − | 195 | | Uncharacterized conserved protein | COG2411 | [S] |
| 1578 | 1591464 | 1592075 | − | 203 | RpsB | Ribosomal protein S2 | COG0052 | [J] |
| 1579 | 1592112 | 1592303 | − | 63 | | Ferredoxin | COG1146 | [C] |
| 1580 | 1592327 | 1592497 | − | 56 | RpoZ | DNA-directed RNA polymerase | COG1758 | [K] |
| | | | | | | subunit K/omega | | |
| 1581 | 1592624 | 1593769 | − | 381 | | Predicted deacylase | COG0624 | [E] |
| 1582 | 1593766 | 1594827 | − | 353 | | Uncharacterized conserved protein | COG3367 | [S] |
| 1583 | 1594854 | 1596443 | − | 529 | HYS2 | Archaeal DNA polymerase II small | COG1311 | [L] |
| | | | | | | subunit, predicted phosphatase | | |
| 1584 | 1596507 | 1597112 | + | 201 | | Uncharacterized protein | | |
| 1585 | 1597109 | 1597681 | + | 190 | | Predicted epimerase related to | COG0235 | [G] |
| | | | | | | ribulose-5-phosphate 4-epimerase | | |
| 1586 | 1597665 | 1598027 | − | 120 | | Uncharacterized protein conserved | COG1698 | [S] |
| | | | | | | in archaea | | |
| 1587 | 1597981 | 1598511 | + | 176 | | Predicted transcriptional regulator | COG2771 & | [K][S] |
| | | | | | | containing DNA-binding HTH domain | COG1284 | |
| 1588 | 1598508 | 1598981 | + | 157 | | Uncharacterized Zn-finger-containing | COG1645 | [R] |
| | | | | | | protein | | |
| 1589 | 1598944 | 1600101 | + | 385 | | Predicted ATP-dependent | COG2232 | [R] |
| | | | | | | carboligase related to biotin | | |
| | | | | | | carboxylase | | |
| 1590 | 1600098 | 1601198 | + | 366 | MurF | UDP-N-acetylmuramyl pentapeptide | COG0770 | [M] |
| | | | | | | synthase | | |
| 1591 | 1601232 | 1601696 | + | 154 | Ndk | Nucleoside diphosphate kinase | COG0105 | [F] |
| 1592 | 1601691 | 1603019 | − | 442 | RecJ_1 | Single-stranded-DNA-specific | COG0608 | [L] |
| | | | | | | exonuclease | | |
| 1593 | 1603095 | 1603544 | − | 149 | RpsO | Ribosomal protein S15P/S13E | COG0184 | [J] |
| 1594 | 1603551 | 1604117 | − | 188 | | Xanthosine triphosphate | COG0127 | [F] |
| | | | | | | pyrophosphatase | | |
| 1595 | 1604190 | 1605986 | + | 598 | InfB_2 | Translation initiation factor 2, | COG0532 | [J] |
| | | | | | | GTPase | | |
| 1596 | 1606043 | 1606858 | − | 271 | | Metal-dependent hydrolase of the | COG3608 | [R] |
| | | | | | | aminoacylase-2/carboxypeptidase Z | | |
| | | | | | | family | | |
| 1597 | 1606866 | 1607216 | − | 116 | | Uncharacterized conserved protein | COG1990 | [S] |
| 1598 | 1607390 | 1607761 | + | 123 | RPL8A | Ribosomal protein HS6-type | COG1358 | [J] |
| | | | | | | (S12/L30/L7a) | | |
| 1599 | 1608218 | 1608949 | + | 243 | | Uncharacterized protein conserved | | |
| | | | | | | in archaea | | |
| 1600 | 1608909 | 1610417 | − | 502 | GuaB | IMP dehydrogenase | COG0516 & | [F][R] |
| | | | | | | | COG0517 | |
| 1601 | 1610484 | 1611053 | − | 189 | | Uncharacterized membrane protein | | |
| 1602 | 1611106 | 1611819 | − | 237 | | Uncharacterized protein conserved | COG1891 | [S] |
| | | | | | | in archaea | | |
| 1603 | 1611915 | 1612466 | + | 183 | | Uncharacterized protein | | |
| 1604 | 1612436 | 1614199 | + | 587 | TopA | Topoisomerase IA | COG0550 | [L] |
| 1605 | 1614640 | 1615353 | + | 237 | | 5-formyltetrahydrofolate cyclo-ligase | COG0212 | [H] |
| 1606 | 1615336 | 1616505 | − | 389 | ArgD | Ornithine/acetylornithine | COG4992 | [E] |
| | | | | | | aminotransferase | | |
| 1607 | 1616509 | 1617411 | − | 300 | DapA | Dihydrodipicolinate synthase/N- | COG0329 | [EM] |
| | | | | | | acetylneuraminate lyase | | |
| 1608 | 1617430 | 1617642 | − | 70 | RPS17A | Ribosomal protein S17E | COG1383 | [J] |
| 1609 | 1617635 | 1617913 | − | 92 | PheA | Chorismate mutase | COG1605 | [E] |
| 1610 | 1617867 | 1618727 | − | 286 | | Archaeal shikimate kinase | COG1685 | [EH] |
| 1611 | 1618931 | 1619194 | − | 87 | | Uncharacterized protein | | |
| 1612 | 1619379 | 1620722 | − | 447 | Ffh | Signal recognition particle GTPase | COG0541 | [U] |
| 1613 | 1620719 | 1621768 | − | 349 | FtsY | Signal recognition particle GTPase | COG0552 | [U] |
| 1614 | 1621798 | 1622271 | − | 157 | GIM5 | Predicted prefoldin, molecular | COG1730 | [O] |
| | | | | | | chaperone implicated in de novo | | |
| | | | | | | protein folding | | |
| 1615 | 1622271 | 1622513 | − | 80 | RPL20A | Ribosomal protein L20A (L18A) | COG2157 | [J] |
| 1616 | 1622531 | 1623196 | − | 221 | TIF6 | Translation initiation factor 6 (EIF6) | COG1976 | [J] |
| 1617 | 1623199 | 1623459 | − | 86 | RPL31A | Ribosomal protein L31E | COG2097 | [J] |
| 1618 | 1623475 | 1623630 | − | 51 | RPL39 | Ribosomal protein L39E | COG2167 | [J] |
| 1619 | 1623644 | 1623997 | − | 117 | | DNA-binding protein | COG2118 | [R] |
| 1620 | 1624027 | 1624476 | − | 149 | RPS19A | Ribosomal protein S19E (S16A) | COG2238 | [J] |
| 1621 | 1624522 | 1624839 | − | 105 | | Predicted RNA-binding protein | COG1534 | [J] |
| | | | | | | containing KH domain, possibly | | |
| | | | | | | ribosomal protein | | |
| 1622 | 1624826 | 1625212 | − | 128 | RPR2 | RNAse P subunit RPR2 | COG2023 | [J] |
| 1623 | 1625166 | 1626401 | + | 411 | | Uncharacterized protein specific for | | |
| | | | | | | M. kandleri, MK-39 family | | |
| 1624 | 1626335 | 1626904 | + | 189 | HyaD_2 | Ni,Fe-hydrogenase maturation factor | COG0680 | [C] |
| 1625 | 1626880 | 1627365 | − | 161 | | Ferredoxin fused to cHTH-type DNA- | COG1145 | [C] |
| | | | | | | binding domain | | |
| 1626 | 1627362 | 1628921 | − | 519 | | Membrane protein implicated in | COG2244 | [R] |
| | | | | | | protein export | | |
| 1627 | 1628934 | 1629821 | − | 295 | IlvE | Branched-chain amino acid | COG0115 | [EH] |
| | | | | | | aminotransferase | | |
| 1628 | 1630003 | 1631064 | + | 353 | | Uncharacterized protein | | |
| 1629 | 1631048 | 1631341 | + | 97 | | Uncharacterized protein | | |
| 1630 | 1631363 | 1632712 | − | 448 | | tRNA/rRNA cytosine-C5-methylase | COG0144 | [J] |
| 1631 | 1632739 | 1633479 | + | 246 | ArgB | Acetylglutamate kinase | COG0548 | [E] |
| 1632 | 1633413 | 1633727 | + | 104 | | Uncharacterized protein conserved | COG1849 | [S] |
| | | | | | | in archaea | | |
| 1633 | 1633814 | 1634437 | + | 207 | | Uncharacterized protein | | |
| 1634 | 1634606 | 1635241 | − | 211 | | Zn-dependent hydrolase | COG0491 | [R] |
| 1635 | 1635284 | 1636138 | + | 284 | | N6-adenine-specific DNA methylase | | |
| 1636 | 1636477 | 1637091 | − | 204 | | Uncharacterized protein specific for | | |
| | | | | | | M. kandleri, MK-1 family | | |
| 1637 | 1637295 | 1637957 | − | 220 | | Orphan DOD family homing | COG1372 | [L] |
| | | | | | | endonuclease | | |
| 1638 | 1637857 | 1638960 | − | 367 | | Orphan DOD family homing | COG1372 | [L] |
| | | | | | | endonuclease | | |
| 1639 | 1639406 | 1640485 | + | 359 | | Uncharacterized conserved protein | COG1679 | [S] |
| 1640 | 1640674 | 1641513 | − | 279 | | Uncharacterized protein | | |
| 1641 | 1641667 | 1642548 | + | 293 | FtsJ | 23S rRNA methylase | COG0293 | [J] |
| 1642 | 1642496 | 1642894 | − | 132 | CpsB_2 | Mannose-6-phosphate isomerase | COG0662 | [G] |
| 1643 | 1642891 | 1644282 | − | 463 | CobB_2 | Cobyrinic acid a,c-diamide synthase | COG1797 | [H] |
| 1644 | 1644369 | 1644533 | + | 54 | | Uncharacterized protein | | |
| 1645 | 1644717 | 1645973 | − | 418 | | Predicted dehydrogenase | COG0644 | [C] |
| | | | | | | (flavoprotein) | | |
| 1646 | 1646079 | 1647389 | − | 436 | | Predicted pseudouridylate synthase | COG1258 | [J] |
| 1647 | 1647793 | 1649076 | + | 427 | Eno | Enolase | COG0148 | [G] |
| 1648 | 1649073 | 1650479 | − | 468 | | Uncharacterized membrane protein | | |
| 1649 | 1650476 | 1651831 | − | 451 | PurF | Glutamine | COG0034 | [F] |
| | | | | | | phosphoribosylpyrophosphate | | |
| | | | | | | amidotransferase | | |
| 1650 | 1652250 | 1655972 | − | 1240 | | Archaeal DNA polymerase II, large | COG1933 | [L] |
| | | | | | | subunit | | |
| 1651 | 1656406 | 1657362 | − | 318 | SplB | DNA photolyase | COG1533 | [L] |
| 1652 | 1657359 | 1658759 | − | 466 | LldP | L-lactate permease | COG1620 | [C] |
| 1653 | 1658795 | 1659637 | + | 280 | | Uncharacterized protein | | |
| 1654 | 1659793 | 1660500 | − | 235 | | ATPase subunit of a ABC-type | COG1136 | [V] |
| | | | | | | transport system involved in | | |
| | | | | | | lipoprotein release | | |
| 1655 | 1660512 | 1661624 | − | 370 | | Permease subunit of a ABC-type | COG0577 | [V] |
| | | | | | | transport system involved in | | |
| | | | | | | lipoprotein release | | |
| 1656 | 1661638 | 1662354 | − | 238 | | Archaea-specific Zn-finger- | COG1326 | [R] |
| | | | | | | containing protein | | |
| 1657 | 1662382 | 1662804 | + | 140 | | Uncharacterized protein conserved | COG2090 | [S] |
| | | | | | | in archaea | | |
| 1658 | 1662954 | 1663568 | − | 204 | | Predicted RNA-binding protein | COG1491 | [J] |
| 1659 | 1663572 | 1663961 | − | 129 | | Uncharacterized protein conserved | COG1460 | [S] |
| | | | | | | in archaea | | |
| 1660 | 1663977 | 1664285 | − | 102 | RPL21A | Ribosomal protein L21E | COG2139 | [J] |
| 1661 | 1664287 | 1664700 | − | 137 | | RecB-family nuclease | COG4080 | [L] |
| 1662 | 1664704 | 1665924 | − | 406 | Pgk | 3-phosphoglycerate kinase | COG0126 | [G] |
| 1663 | 1665945 | 1666487 | − | 180 | | Predicted sugar phosphate | COG0794 | [M] |
| | | | | | | isomerase involved in capsule | | |
| | | | | | | formation | | |
| 1664 | 1666501 | 1667181 | − | 226 | TpiA | Triosephosphate isomerase | COG0149 | [G] |
| 1665 | 1667190 | 1667828 | − | 212 | RpiA | Ribose 5-phosphate isomerase | COG0120 | [G] |
| 1666 | 1667891 | 1669519 | + | 542 | CarB_3 | Carbamoylphosphate synthase large | COG0458 | [EF] |
| | | | | | | subunit | | |
| 1667 | 1669535 | 1670410 | + | 291 | PrsA | Phosphoribosylpyrophosphate | COG0462 | [FE] |
| | | | | | | synthetase | | |
| 1668 | 1670607 | 1670876 | + | 89 | | Uncharacterized protein conserved | COG4014 | [S] |
| | | | | | | in archaea | | |
| 1669 | 1670877 | 1671116 | − | 79 | | Uncharacterized conserved protein | COG1873 | [S] |
| 1670 | 1671113 | 1671736 | − | 207 | | GTP: adenosylcobinamide-phosphate | COG2266 | [H] |
| | | | | | | guanylyltransferase | | |
| 1671 | 1671733 | 1672458 | − | 241 | CobS | Cobalamin-5-phosphate synthase | COG0368 | [H] |
| 1672 | 1672455 | 1673528 | − | 357 | PgpA | Predicted | COG1865 & | [S][I] |
| | | | | | | phosphatidlglycerophosphatase A | COG1267 | |
| | | | | | | fused to a uncharacterized | | |
| | | | | | | conserved domain | | |
| 1673 | 1673554 | 1676526 | + | 990 | NtpB | Archaeal/vacuolar-type H+-ATPase | COG1156 & | [C][L] |
| | | | | | | subunit B, contains an intein | COG1372 | |
| 1674 | 1676578 | 1677276 | + | 232 | NtpD | Archaeal/vacuolar-type H+-ATPase | COG1394 | [C] |
| | | | | | | subunit D | | |
| 1675 | 1677295 | 1677675 | + | 126 | | Uncharacterized conserved protein | COG1417 | [S] |
| 1676 | 1677675 | 1678118 | + | 147 | | Uncharacterized protein conserved | COG2083 | [S] |
| | | | | | | in archaea | | |
| 1677 | 1678361 | 1678825 | + | 154 | HHT1_3 | Histone H3/H4 | COG2036 | [L] |
| 1678 | 1678882 | 1681107 | − | 741 | MPH1/ | ERCC4-like helicase-nuclease | COG1111 & | [L][L] |
| | | | | | MUS81 | | COG1948 | |
| 1679 | 1681086 | 1681853 | − | 255 | | Predicted nucletide kinase | COG4088 | [F] |
| 1680 | 1681881 | 1682882 | + | 333 | ArsA | Predicted ATPase involved in | COG0003 | [D] |
| | | | | | | chromosome partitioning | | |
| 1681 | 1682894 | 1683577 | + | 227 | | Predicted phosphatase of the PHP | COG1387 | [ER] |
| | | | | | | family | | |
| 1682 | 1683574 | 1686540 | − | 988 | RtcB | Uncharacterized conserved protein, | COG1690 & | [S][L] |
| | | | | | | contains a DOD family homing | COG1372 | |
| | | | | | | endonuclease insertion | | |
| 1683 | 1686554 | 1687210 | − | 218 | | Uncharacterized conserved protein | COG3382 | [S] |
| 1684 | 1687182 | 1687805 | − | 207 | | SAM-dependent methyltransferase | COG0500 | [QR] |
| 1685 | 1687856 | 1688686 | + | 276 | | Uncharacterized protein | | |
| 1686 | 1688751 | 1689122 | + | 123 | | Uncharacterized conserved protein | COG1504 | [S] |
| 1687 | 1689119 | 1689883 | − | 254 | PstB | ABC-type phosphate transport | COG1117 | [P] |
| | | | | | | system, ATPase component | | |
| 1688 | 1689888 | 1691672 | − | 288 | PstA | ABC-type phosphate transport | COG0581 & | [P][P] |
| | | | | | | system, permease component | COG0573 | |
| 1690 | 1691739 | 1692728 | − | 329 | PstS | ABC-type phosphate transport | COG0226 | [P] |
| | | | | | | system, periplasmic component | | |
| 1691 | 1692804 | 1693688 | + | 294 | | Predicted ATPase of the PP-loop | COG0037 | [D] |
| | | | | | | superfamily implicated in cell cycle | | |
| | | | | | | control | | |
| 1692 | 1693706 | 1694500 | + | 264 | | Predicted ATPase of the PP-loop | COG0037 | [D] |
| | | | | | | superfamily implicated in cell cycle | | |
| | | | | | | control | | |

The embodiments of the invention in which an exclusive property or privilege is claimed are defined as follows:

1. An isolated nucleic acid encoding an M. kandleri protein as set forth in Schedule B.

2. The isolated nucleic acid of claim 1, wherein said nucleic acid encodes the amino acid sequences of M. kandleri protein that are involved with DNA replication.

3. The amino acid sequences of claim 2, wherein said sequences are further identified by SEQ ID NOS. 1441, 0999, 0965, 0566, 1450, 0006, 1039, 1030, 1604, 1120, 0586 and 1394.

4. An isolated polypeptide having an amino acid sequence at least 95% identical to the amino acid sequence selected from the group consisting of SEQ ID NOS 1-1688 and 1690-1692.

5. An isolated polypeptide having an amino acid sequence at least 85% identical to the amino acid sequence selected from the group consisting of SEQ ID NOS 1-1688 and 1690-1692.

6. An isolated polypeptide, wherein said amino acid sequence is 100% identical to a sequence of claim 4.

7. An isolated antibody that binds specifically to the polypeptide of claim 6.

8. An isolated nucleic acid molecule comprising a polynucleotide having a nucleotide sequence at least 95% identical to a sequence selected from the group consisting of:
(a) a nucleotide sequence depicted in Attachment A wherein the starts and stops of each molecule are identified in Table 1.

9. The isolated nucleic acid molecule of claim 1, wherein the degree of said nucleotide sequence identity is greater than at least 70%.

10. A recombinant host cell capable of expressing the polypeptides identified in Schedule B.

11. The recombinant host cell of claim 10, wherein said polypeptides are further identified by SEQ ID NOS 1441, 0999, 0965, 0566, 1450, 0006, 1039, 1030, 1604, 1120, 0586 and 1394.

12. Computer readable medium having recorded thereon the nucleotide sequence depicted in SEQ ID NO 1692 wherein the degree of said nucleotide identity is greater than at least 70%.

13. The nucleotide sequence of claim 12, wherein said degree of identity is greater than 90%.

14. The nucleotide sequence of claim 12, wherein said degree of identity is greater than 95%.

15. The nucleotide sequence of claim 12, wherein said degree of identity is greater than 99%.

16. The computer readable medium of claim 12, wherein said medium is selected from the group consisting of a floppy disc, a hard disc, random access memory (RAM), read only memory (ROM), and CD-ROM.

17. A method for identifying an amino acid sequence, comprising the step of searching for putative open reading frames or protein coding sequences within one or more of M. kandleri nucleotide sequences selected form the group consisting of SEQ ID NO 1693.

18. A method according to claim 17, comprising the steps of searching an M. kandleri nucleotide sequence for an initiation codon and searching the upstream sequence for an in-frame termination codon.

19. A method of producing a protein, comprising the step of expressing a protein comprising an amino acid sequence identified according to any one of claims 18-19.

20. A method for identifying a protein in M. kandleri, comprising the steps of producing a protein according to claim 19, producing an antibody which binds to the protein, and determining whether the antibody recognizes a protein produced by M. kandleri.

21. Nucleic acid comprising an open reading frame or protein-coding sequence identified by a method according to any one of claims 17-18.

22. A protein obtained by the method of claim 19.

23. A composition comprising (a) nucleic acid according to claims 1, 3, or 21; (b) protein according to any one of claims 4, 5, 6, or 22; and/or (c) an antibody according to claim 7.

24. The use of a composition according to claim 23 as a medicament or as a diagnostic reagent.

25. The use of a composition of claim 23, as a non-specific stabilizing additive for other proteins as well as for their enzymatic or structural activity.

26. A method of treating a patient, comprising administering to the patient a therapeutically effective amount of a composition according to claim 23.

27. A protein that is non-specifically stabilized by the presence of a protein identified by SEQ ID NOS 1-1688 and 1690-1692.

28. A method for improving the stability of a protein by introducing to said protein a polypeptide identified by at least one of said SEQ ID NOS 1-1688 and 1690-1692.

29. A method of increasing the enzymatic activity of a protein by introducing to said protein a polypeptide identified by at least one of said SEQ ID NOS 1-1688 and 1690-1692.

30. A method of increasing the structural activity of a protein by introducing to said protein a polypeptide identified by at least one of said SEQ ID NOS 1-1688 and 1690-1692.

31. A composition comprising a polypeptide identified by at least one of said SEQ ID NOS 1-1688 and 1690-1692 in combination with a protein not identified by one of said SEQ ID NOS 1-1688 and 1690-1692.

The application's sequence listing, which the Patent Office published only in electronic form, follows.

SEQUENCE LISTING (1722 sequences)

SEQ ID NO: 1 - protein, 352 aa, Methanopyrus kandleri
MSLIEIDGSYGEGGGQILRTAVGMSALTGEPVRIYNIRANRPRPGLSHQHLHAVKAVAEICDAECEGLEIGSTEIVFEPGKVKGGEYEVDIGTAGSVTLLLQAVKLAAIAADGPVEMEVRGGTDVKWSPPVDYEINVNAHYLDRLGYRYELEVLRRGHYPRGGGIVRARMEPPKRLKPLEAVKFGELESVRGISHCVRLPPHVAERQAKAASEIIERELGIRPEIEIETYPKGRDPHLGPGSGIVLWAEDDQGNRIGADALGEKGKPAEVVGREAAEQLVQRLRTGMALDEHMGDQILPFLAIADGESVFGVTGVDPHLPTNAWVVEKFLPVSVEIRGKEGEPATVEVRPEG

SEQ ID NO: 2 - protein, 171 aa, Methanopyrus kandleri
VGVIEDMMKVGMRSAKAGLEATEELIKLFREDGRLVGSILKEMEPEEITELLEGASSQLIRMIRSLHTPAVDVFERSGEFVIVAEVPGARPEDVQVRAGERFVEITANIPKMREGEAKTRERVTGEVRRRIDLPEKINPSAVSAKCGRGLLIVRAPKAEASEIEVKPMEEE

SEQ ID NO: 3 - protein, 352 aa, Methanopyrus kandleri
VSGNPFRKMPEVPDPEELIDVAFRRAERAAEGTRKSFYGTRTPPEVRARSIEIARVNTACQLVQDRLWEIVRKTPNLDELHPFYRELADALAGIDRLKSSLADVHTVAKIARLIREEYTRKIKRARDPRTAAELRRQAFGRLASTIRRKVGDALRFLRKVQPKLVDLPAIDTEMFTVTLAGFPNVGKTTLMTVLTGSRPEIAPYPFTTKGIQVGYMERPYPVQMLDTPGLLERPEEERNPVERQAIAALKHVTDAVLFLIDPTGTCGYPVEEQLELLDRVRKEFDVPVYVVLTKADLRDLWEEPDLEGEPVYKVSATERTGLKELRELLNDLARGHYSGRDRGHDEGRDEER

SEQ ID NO: 4 - protein, 105 aa, Methanopyrus kandleri
MEYIYAALLLHAAGQEINEDNLRKVLEAAGVDVDDARLKATVAALEEVDIDEAIEEAAVPAAAPAAAAPAEEEEEEEAEAEEEEEEEEEEEAEEEAAAGLGALFG

SEQ ID NO: 5 - protein, 510 aa, Methanopyrus kandleri
LVPWVEKYRPRSLKELVNQDEAKKELAAWANEWARGSIPEPRAVLLHGPPGTGKTSAAYALAHDFGWDVIELNASDKRTRNVIEKIVGGASTSRSLLRMTREAGGDYEHVEGHSDRVLVLVDEVDGIDPREDRGGVTALTRAVRQARNPMVLVANDPWVLPKSLRDAVRMIEFRRLRVNDIVEALRRICEREGIEYEEVALRRIAKRARGDLRAAINDLEALARPTGRVTSDDVEALGWRDKEITIFEALGRIFNKPPRQARRALWNLDEDPDDVILWIAQNIPRAYRDPEEIARAYDYLSKADVFSSRAIETGDWRFKYVYATDLMTSGVAAARKGKPPGFVRFQPPKILRKLGTTRKEREVRNSIAKKIAERMHVSTRRAKMDVISVLEIAFRKVADNPTDRGLEILGGIAGYLELSKREIGFLCGDPQVAQRVYQRALRVREKLRKIRRERVKGAMESMLERKREESEVEEEAKEIEEAVEKAEEEEEREEKKKEGGGEQRTLDAFF

SEQ ID NO: 6 - protein, 635 aa, Methanopyrus kandleri
MAEHELRVLEIPWVEKYRPKRLDDIVDQEHVVERLKAYVNRGDMPNLLFAGPPGTGKTTAALCLARELFGEHWRDNFLELNASVSADTPILVRRGGEVLRVTFEDLDSWYFGDRGGEYVDVSDLEVLTVDRNFRVTWARVSKLIRHRARKILRVHLEDGTIELTGNHAVMVLDEGGLRAVKASEIEEGSFLLSFVAELDEQPTDGGTVVTSVGSGSRVSDTTYELPVEVRVELLRELADDGVIEASEDVSVDLAWLARISGVESRVTDDGVELVWETRTGDLLPADPVLKLVERLESDLVDDLESWVFDGRVSKEAVRKVLSSVDAKNLRGDARRAYRMLRTLVRSDVHAVKVEDLDVMDYDGYVYDVSVPGNEMFFAGEVPVLLHNSDERGIDVIRTKVKNFARTRPMGGARFKIIFLDEADNLTRDSQQALRRIMEMYSDACRFILAANYSSAIIDPIQSRCVVFKFTKLPESAIKERLRKIAESEGVEITEDALDAIVYVSEGDMRRAINVLQAAAALGREIDEDTVFQIAATARPEEVREMIHHAWNGDFERARELLHELLTRYGMSGEDVVRQVHREIFDMDEIPEEAIPELVNAVGDFEYRLIRGSDERIQLEALLARIHALGNEYSGG

SEQ ID NO: 7 - protein, 455 aa, Methanopyrus kandleri
LVEIKEIGEVSTEETSPGAHSHITGLGLDENLKAKPVGDGLVGQEEAREAAGIVVEMVKQGRRAGHGLLLVGPPGTGKTAIAYGIARELGEDVPFVSISGSEIYGTNLSKTEFLQQAIRRAIGVEFTETREVIEGKVESLEIERAKHPLSPYMEVPSGAIIELKTQDDHRRFKVPEEIAIQLVQAGVREGDVIQIDVESGHVTKLGRAKDALEEEEEELLGVHAVELPEGPVQKKKEIKRVVTLHDLDMANVRAGRLLGFREEEITDEIRQKVDERVQKMVDEGEASLVPGVLFIDEAHMLDIEAFAFLNRSLEEEIAPILVMATNRAMAKVRGTDEEAPHGIPGDLLDRMLIARTRPFERHEIHEIIGIRARVQDIQLTDEAHEYLTDLGEEKSIRYATRLLEPARIVAEKEGSEVVEKKHVERVEEVFTDVSDSVEYMERMRRELPVMKYLTG

SEQ ID NO: 8 - protein, 121 aa, Methanopyrus kandleri
MGTPEGIDVITVVISEAPYGQERAYTALRFALTALVEGEEVKIFLIEDGVFLGKKGQNPDEVPNYLELLEQCIEQGAEVKACGPCSKARGLSEEDFIEGVELATMHDLVNWVKESDNVIFF

SEQ ID NO: 9 - protein, 383 aa, Methanopyrus kandleri
VYVATWTGPGLDTDPNPETNCWTTSVWDVKWWNSHLDEVPVKEQIELIPVKDISRWRRILYTGVDPVTGHRIDVVYVPGGWRPEEHWGSDWDDLLRWAQLHLGIGYVGICAGATTFIRAFPCVWSVDGLKGHALPEVLLLPHPANPLVQEGESRVIRMYYANGPGMEWKRGWYTIKYYIDKKLHKIKAYCDVQGVMKYLEHVKGWAYVAGRWIVDGVEKGRFVVMSVHPEIMGRKDKDPDMVQTFIYAILWAAKRLPSGWKIHLTLDKTLVGVGEAVKVVLRLVNSVGAPIADFSPIWVKVVGPEGEEEHVLKTNEEGKATLTVVPESEGLYRIEASAVDVQATGSFSVGIPPVPFPVVTGVLIAAILGIVVTPRRVRQSSQG

SEQ ID NO: 10 - protein, 224 aa, Methanopyrus kandleri
VEPDELIEELELRKRPRGTVLLCGIGRLGFRVFLRLLETHRGGPKRIVCVDGQRVEPDDIIHLRHGARIGENKAEFAARLGRVHPLREVHAEPEFVTEENASELVDTWEPDVVVITIAGGRTTPVTAALAREARRFGAVTVSTGGVFGYGSEEVRVVQLEEAEGPVARELREYGAPSDHVLVTTGRYIRDPDPIPPMVLERVADELTELALRALSNPSRGDDDS

SEQ ID NO: 11 - protein, 283 aa, Methanopyrus kandleri
MTVAKAIFIKCGNLGTSMMMDMLLDERADREDVEFRVVGTSVKMDPECVEAAVEMALDIAEDFEPDFIVYGGPNPAAPGPSKAREMLADSEYPAVIIGDAPGLKVKDEMEEQGLGYILVKPDAMLGARREFLDPVEMAIYNADLMKVLAATGVFRVVQEAFDELIEKAKEDEISENDLPKLVIDRNTLLEREEFENPYAMVKAMAALEIAENVADVSVEGCFVEQDKERYVPIVASAHEMMRKAAELADEARELEKSNDAVLRTPHAPDGKVLSKRKFMEDPE

SEQ ID NO: 12 - protein, 182 aa, Methanopyrus kandleri
VLRVATAECFTHGFVGREIHASASGYTGELGSEILGTELEGKVSVVAACFIPTVSGLRSLLGIDPPEPDEVSKSGAKAYREETDRKVAVMMARAVRERTGADVGIGTTAGIGRGAICLDDGEITLLGRTDVHANLLKPDERIRKRQLQGIKRSLVMFRAYFRCELDELLEEEWVEEVTRDLP

SEQ ID NO: 13 - protein, 358 aa, Methanopyrus kandleri
MVEINKVAILGAGCWRTHAATGITTFKRACEVADETGIKEAALTHSSVTYAVELKHLAGVDEVVLSDPVFDADGFTVVDIEEDCDVDLDEFIKAHLEGNPEDVMPKLRDYVNDIADDVPKPPKGAIHFLSPEEMEDKLDIVVTTDDAEAVEDADMIISWLPKGGVQPDIFKKIIDDIPEGCIVANTCTIPTRQFKEMFEDMGRDDLQVTSYHPATVPEHKGQVFVAEGYADEEVVEAVYELGEKARGLAFKVPGYLLGPVCDMASAVTAIVYAGLLTFRDACTDILGAPVDFTQNMAVEALQMMAKFMEEEGLDKLEEALDPAALTNTADSMNFGPLADTEILPKALEVLEKYSKKAE

SEQ ID NO: 14 - protein, 252 aa, Methanopyrus kandleri
LKEPEPGITDLTETVRSRPFWDVVKEIGLAKAEEIAEVVPEGSRILVLGAYLTGIFVAELLSEEHEITVLDPEPALRKILPPGVRFRASRVPPPGRYDVVIDLTGLGGTNPRVLRRLNPEVLVVENPAGNMNDPRIEEYNDTEERLEAGEESYELRLFDAPFEAKTSGTFTLSVRTVREAANRLERHYGVLYAVPGVVNLERWTFRLRRPEEGVERAREKPAVTVSQLTGSSDPDEVIGEVLDEILFEIRER

SEQ ID NO: 15 - protein, 253 aa, Methanopyrus kandleri
MRSSSKSVSVEGVLEVLEGLAPFDLAVEGDEVGLVAGDPSDSVDRVVVCLDLTPQLVRRLSPETLVISHHPVPGPLLERVRSPVIVFHSNWDAARAAEALAEWLGLEDVRKPDPLAAEGRFDGTLEDLLSRVEDALNPPEIRVVATKNRIHRVIVVSGFGLSTDRFVRLAAKEGADAVVSGDLTHRTAVVARVLGVTCVDATHARTELPGLKELAEELSKRLRVRVELRSPEHPVGDHYRAFQRRAARSQDGS

SEQ ID NO: 16 - protein, 356 aa, Methanopyrus kandleri
VRFKDALREVRTDRKLADTEAIVRLLSAKSVRVHDLFRAALSEKLHHRGELVKLTSTIHVTNECRIRPRCAYCGFAAGASPEGYFEGFTRSYEEIAEAAKAIEESGIPRVSCSGAYRGDGGKLAVTAARAVKENTDLELLINFGHDLSEETIAELARLDVETICCNLETTNRELFERLKPGDSFEERVRVCETVCRYGIDLSSGLLVGIGEDYRDRAEHLKFLARFETLAEIPIMGFNPYPGTLMEHVPRCPLLEQAKVMAVARLMYPDLMITAPTPTVGPEEVEVALMAGADNLATVIPDNHPHEVKGVGNPRTGNLDRVVELIEGFGLKPELRGDRACSTSCTKLVNRSTQRSS

SEQ ID NO: 17 - protein, 511 aa, Methanopyrus kandleri
LLDLLHEACESLDAALELKRLAYEGKLSVDEVVTDLGELTDRELEALGDNLRTFPMGCDLIELAVGPCASDYSPDVLLANAILADRMGLPLHVCAYAVADVAENYGMRPIELFRRLVRNVRVPVDVDHIGAHGPMRFPRDITACEGTCYLEGPPFKECPRGRIHRRLIDKERQQGEDLEEWAELAASICVNVTGEGGQDAEAHAAPLDEMKRVAETARHSGAGVGAILHVADGEDEFADGLKAAVEEVKADYLAVEGGPFNRAEDRLSAFRRAVVACRVFAPGKVVLTNGAYEDELVVGLRAGLNGALSGFPKNHHGYMVGYEPGTARRGKFGLPKVLAIMRKTLGSRYGNTKVPAGWEELEGITRAALFLGSNLLYPRDVAGIPIGDVHWVAALRSNAARELSDEVRSVEEVASEVDADTVALLGGRFPAWGLALTLDELGVSEVLISDPDAWVERATVRLLDEELDATVHAMAGDDRKAVKEADAAFVTAVMPGIAERLAERTGAMTVC

SEQ ID NO: 18 - protein, 160 aa, Methanopyrus kandleri
VLKETLLKAWWESWEGTRRGDEEREVEGLREYLTSADRLAVVTGNEDKLRAVNKVLRRFGLPEAEMIRVPTEMADATPCPAIFKAIMGVQVSDADVVIARGRLGVPGSGAMTVFMDARCRLLTAALSPPHVLHEMSVKEAMEREAEEALRRLGMRETTSR

SEQ ID NO: 19 - protein, 340 aa, Methanopyrus kandleri
VFSVPSPGDPALTDRLLRSLPTDRIETVYFGLPIAGTGRATPVQVDTDTATELAEVCHSYSVEPEAVINPLCTADVVCSRNAFAEFERTLDDLDDAGIERLVLSDPLMIHAAVERGFRVSVSCVVEVNTPERARYFDEIGVEEITLDTNVNRRLDTIEAIASEVSARLRIIVNEGCLPDCPYRASHFCLFSHATRPGEEVAEDPYFVRCISERVNNPTLIIKSPFVRPEDLSVYMDLGVRAFKIAGRANSITWIRRAVRAYLRGRYDGNLLDILDCPTVLRHLYHVDNRELDGFLKRVGRCDRRCSKCGFCAELAERAVEPLGGLEDAEVEPARTGRVTA

SEQ ID NO: 20 - protein, 119 aa, Methanopyrus kandleri
MPKLNQRGLVELRRELERRLVELLGKPVHVMQLTIFALPCGCVGASLEVRNIVREDAEVFRDHLRDLLREMVKWTLGKEPDLYYARLTPSGYDVVSLTGRVACDECEKNFKGAADVLPL

SEQ ID NO: 21 - protein, 256 aa, Methanopyrus kandleri
MTEVGVIGGTGFQPGLPERRRTVFTPYGTVRVDITRVGDHRVYFINRHGKGHDLPPHRINYRAIVWAMRELGVKRILATNSVGVINSDEYEPGDIVLPVDFLDFTKRRPTTFYDEKVVHVDVTEPYCPELREALLKAADDLGYTVKEGAVYVATEGPRFETPAEIRAFRKLGGDIVGMTGFPEVVLARELEICYASVCLCTNYAAGIDDRRRTIDEVFELVEELRPKAVELIERCIEYIPPKRSCPCSQALEGAEV

SEQ ID NO: 22 - protein, 193 aa, Methanopyrus kandleri
VFSISVVITIGGLPGSGTTTMARRLAEHYGLKHVYAGKIFREMAEERGMDLEEFSKVAEDNPDIDLEIDRRQREAAEEGDVILEGRLAAFVAAGELDHVKGPDLATLKIWLKAPLEVRAERVAKREGIDVEEARRRIQEREKSELKRYKEIYGVDPTDLSLYDLVLDTSRWSEDETFSILKAAIDPLLEREDP

SEQ ID NO: 23 - protein, 113 aa, Methanopyrus kandleri
MPAPRYRSRSCRRVYKRTPGGRTVIHFEKKIPNWPKCGACGRRLNGVMRGRNVELKNAPKTQKRPNRPYGGVLCPECARKLIKDKVRYKFWERKREQPWLPVLPDEEPPEPEE

SEQ ID NO: 24 - protein, 178 aa, Methanopyrus kandleri
VHGLTEGLARHFYPLVDPFIHYFGPALGMLVAAALVTLFIDIVYELVIGREELERVRKMADETKKYQEELQRAKVLGDVKRMKEIEEKMRDHSREFLKVQSQLMSKQIKAMIITFPPIIIIIYTLEYRLAHWTVKLPFYVPGVGDTLGPVGWYILCAVTVSFVLKPLAETAVKRFGGG

SEQ ID NO: 25 - protein, 191 aa, Methanopyrus kandleri
MGYVIVATGVPGVGATTVTTEAVKELEGYEHVNYGDVMLEIAKEEGLVEHRDEIRKLPAEKQREIQRLAARRIAKMAEEKEGIIVDTHCTIKTPAGYLPGLPIWVLEELQPDVIVLIEADPDEIMMRRVKDSEERQRDYDRAHEIEEHQKMNRMAAMAYAALTGATVKIIENHDDRLEEAVREFVETVRSL

SEQ ID NO: 26 - protein, 458 aa, Methanopyrus kandleri
LADDWLERLRPILERLPEVKVPDRHVPFNEKLFKYTGIPLILYFILCEIPLYGLSPQAVDYFANLRAVLAGNFGSILTLGIGPIVTASILLQLLVGGDLIKLDLTNPEDRRLFQGLQKLLAIVLCFFEGVMMVFSGAAPPAEPSILLEILLILQLALGGILVIFLDEVVSKWGIGSGVGLFIVAGVSSQIIIGAFNPLPSPQQPGRPAGAVWAFLYSAMQGTPDWTLLAPVIGAIITFLIVLYVEGMRVEIPIAFAGIRGARGRFPVRLLYTSNIPVILASALFMNVRLWALAFQRMGVPILGKLDPRGQPISGLVYYLSPPNSIVKTLSDPLQALGYMMAMVIASVFFAVLWVELTGMGPREIARHLHRAGLHIPGFRRDIRVLEKRLQKYIYPVTVMGGAFVGFLAAGADLMGALGGGTGVLLTVSILYNMYEEIKQERLMEAHPVVRKFLEKTLR

SEQ ID NO: 27 - protein, 154 aa, Methanopyrus kandleri
VVVRRKKKSPKKYRGSRTHGGGSHKNRRGAGNRGGRGMAGSHKHKWFHVIKYMPDHFGKRGFNRPPKVVREPNTINVGELDALADKLLEDGIAEKDGDKIVIDVTDERLKPYGGPFDKVLGGGHVKRPLVVVAPEFTERAVEKLEEAGGEAREA

SEQ ID NO: 28 - protein, 149 aa, Methanopyrus kandleri
VRGPVGVRRDIEDTMRMLKLLRRNWCVLIDDRPSYLGMLQKIKDYVTWGEVEPDTVAALLKKRGELEGGRPVTDEYVSEHTEYDSVEEFARAYCEFEAELDDIPKLKPFFRLHPPRGGYERGGIKKPYTLGGALGYRGKAINDLLERMI

SEQ ID NO: 29 - protein, 226 aa, Methanopyrus kandleri
MSVPPHLEEWEPKTKLGRMVKEGEIKTIDEVFAQGWKILEPEIVDWLLPDLEEEVLDVNMVQKMHKSGRRVRFRVTVVVGNKDGFVGVGQGKAREVGPAIRAAIDRAKLNIIKVRRGCGSWECGCGRPHSIPFEITGKCGSVRITLKPAPRGTGLVAGETAQKVLEMAGIEDVWTKTTGGKGKGETRTTINFAKATFDALRNLIYVRMREEEAERLGIVSGSAEGA

SEQ ID NO: 30 - protein, 202 aa, Methanopyrus kandleri
VIALATGPRYRVPFRRRREGKTNYYKRRELIKADAPRLVARKTLNHNIAQIVDFAPHGDVTLASAHSIELRNKFGWKGHCGNTPAAYLTGYLCGLRALERGIERAVIDIGLHRPVRGSRVFAMLKGALDAGMDIPHGEEVLPPEDRIRGEHIANLARQIKEEDPEEYERRFSKYLERGLKPEELPEHFEEVKSKIEEEFGGA

SEQ ID NO: 31 - protein, 149 aa, Methanopyrus kandleri
MNLRPQRRMAAEILKCGVHRIWIDPERLEEVARAQTREDIRRLIKEGAIRKKPIKGQSRVRARKRHEQRKKGRQRGPGRRKGAKGARMPKKRAWIQRIRPIRRKLRELRDSGKIDRSTYRKLYMMAKGGYFRDTSHLLAYIEENDLWKK

SEQ ID NO: 32 - protein, 201 aa, Methanopyrus kandleri
MKYKMELSDLECPVCGEKALMVHGRVDEIPHFGRVLEQFIHCKACGYRHSDVMCLEDREPAEYRYRVNSPEDLRVRVVRSPSGFVEIPELGIEVKPGPAAQGFVSNIEGLLRRIRERVETAAKWADKEESKKRAEEILRRMDAAVSGEDEITIVLKDPYGHSAIVPEEDDKLEVRELDEEEAEELRSRIFRPLVPSGEYSN

SEQ ID NO: 33 - protein, 327 aa, Methanopyrus kandleri
MARSTIVLIGGASGVGTSTIAREVARRLNITHLIETDHLREVLRGAIDKKYAPVLHMSSYNAYRALRIPDHMVPKRFRDRVIAGFVEHASMVKPAIDMVIKRAVEDASDLVIEGVHLVPGLVRPEDYQYADVHMVILYADEEEHRERFVKRAMEKGRGGRHLEYFRQIRIIHDFLLEAADEHGIPTIKNDDIDRTVSEVLSVVRSVSVVIKSVHSLEDSVREAEIIRENNCRLIDIGFPIPGKRDVIKVSFRRDPVDEWEEILNNEESRQYFKHLYSASNNVHYHKISAPDEESLHRAIEKLREEGFKVEELRPGDVCEVGKEDRGG

SEQ ID NO: 34 - protein, 115 aa, Methanopyrus kandleri
MLGFLKKIFGEGENSKGPMLEDFLEEEEEERTQHPKVTIIVSRVQEPSDLEELMNELYQGNVLILDVKPLLDRDGHEDIIQELKRTAVSLGGFVGVIKDTVLLVTSDSVDIERRG

SEQ ID NO: 35 - protein, 363 aa, Methanopyrus kandleri
LTVLRSIDELAELNPFAVVGAGGGGEKFATLPTVEVVGIMDDDPSKVGMEIAGVKVTNDFDEAVEGASSVAIMLPKGAEHRALELAVESIRRGLNVVTSFRSLPLEDYPALVKLAESKGVKILELSPRLDVVREVAGDAPERCTEVVPKKDRPETEIPRVFVGGTSQECGKRTTTLKLAEGLEASGYTPATVATGEFAALEADVGFRAGSLSVMDVASAVAHAVDYVAEEKDADVIIVEGQSSLTERRNPHPRPLYLGILLGCAPDAVVVCHRPNHPFRYPRGVLAEVNALRVIVPDADLAAVCVNPRNLEEPFETYARRLRAKIWRATGEQVPVRNPVEESEKLARDVLRTIEGAGRGGARC

SEQ ID NO: 36 - protein, 196 aa, Methanopyrus kandleri
MKETSVKEVPELDSRAFRIAVLGPENAGKSTLVNALMGREVTEVSEVPGTTKTVSGYRWTSREFPLYVFDTVGLADERGKRSKRGVRAEDVAEKLGRYDLALFVVDVTRHVGPETLRALHVIKYAADLETLLVANKIDLLDRGELEERLERIRERTGHRPIPVSALTGEGIGRLLREIERRVREKRRTLRAAPGYR

SEQ ID NO: 37 - protein, 188 aa, Methanopyrus kandleri
LDVEAVYRLKRILRTGWLVRGIPRSSVESVAEHSFGAAMLAWEICHRLAERGIDVDPYKTVVMALIHDLPEALTLDLDVEASRVFGDAKREAEEKAAECVFDEELLDLWREFERRESPEAKAAKLADTLDMALQALEYSQVGFEAYREFLDSAEREARELGREYLLVFKEILRERGWDSNEGGGKGSG

SEQ ID NO: 38 - protein, 353 aa, Methanopyrus kandleri
MKVVEKDLDKGYIEVLPETLDDLWHLYHVVRKGDLVFALERRRVKDERAETIRRDKGERKPVYLGVRVEDVEFDKYANRLRIKGVIEHGPESGSHHTVNVTTGKRIKIVKDEWERKDLERIEEAEMSRPPVMLVAVDTGEGTIGIVRDYGLDVVARVRHNVPGKRGGDRRAEMRKFFHRLADEIERIAEEEGVEHIVVGGPGFVKSDFAEFLREERDIPAHVEDTGSAGEAGLIEMIRRGAVERAVEESRVAEEVKHLEEVFKRIGKGDDKVAYGVRECLKAAEFGAIDVLLVADEKFREAMVEGEEDVLNAVKYAERTGAEVLIVSTEHEWGERLRELGGIAALLRFSIPTG

SEQ ID NO: 39 - protein, 252 aa, Methanopyrus kandleri
MAVERVSTGIPGMDEVLNGGIPERNAVLLTGGPGTGKTIFSQQFIWAGLEEGEPGVFVTLEEHPVQVRKNVEGFGWNFREYEEEGLLAVVDAFTGGIGRASEYEKYVVKDPTDASELIGVIRQAVNDVEAKRVAIDSVTPLYIDKPSVARRIMFRLKRMLAGLGCTSILVNQIAAHERGFGGPGVEHAVDGIIRLDLDEVEGRLWRSLIVWKMRGTAHSMRRHPFEITDEGIRVDPEKVFVKERGEVREVED

SEQ ID NO: 40 - protein, 382 aa, Methanopyrus kandleri
LGGLCPRCRGRGWCGRDRCPFLDALNEVRARLSSRNVDGYTVTAHVSWRGYPRVIAAPGVGEHRTPDEGGVLADLPYEEALKTRALTFRRYRGKRDVRNPPDLSDPEIESSISVRPVESTLQVRRRLSGASRTTPFIGPLVEGELELDGTPKVPRDLERYHEDDVKAEEAVVGLYRRGYDESYIARALSLGLLGRDRRMVPTRWSVAAVDSMVSEHLAREVRDLPVSSEYRVLSGEVFGNEMWVILRPEPLSYELVEAYEPGAPWSDRTRIAVLRDSEVKDCKEPRETGGAYFAARLAALEWCSELGKQHGITVIRIVRKEYSAPLGAWVIREAVRRAEEVFSTDDPREVWEFLREKLDDPVGEAALKVIKRGRQRTLDTFL

SEQ ID NO: 41 - protein, 606 aa, Methanopyrus kandleri
MLLLKDHAEVLLTVEELGTREEAREIAEEAEAVTEIIPQRLLELELQGLMKRVGPNEWELTDAGKTAAKAVAEAVDILEQPPQEWAHDRWVGSDTVLALKHAALSFVPERWEELLSERGLSEDGELTKAGELVLEAYFKATPKLYVTQDVAGRIARLPPGPGTLKTFIRYRETIDIPDNIFHALEAMRLLVISPPADGGRTYTLTALGREVKYAIEKAIPAMHLVLSPGIMEDVKAVSEGEEPEDMERLERLGYAWKGSLTRAGEHVLRAYEMVGEDFPGVPPISIRPSELRLLEIIDHLYRPDENPNVAPTLKRIKRVLVEEYGEADPDPTTDLKELEAHGFVEKTVCDYGKEKGKPIWVLTEEGERLLHGLGAPVRAEGVKAVTVSMGFESPSPEWLEEAHRAGLVSQAAITTKGLMAAKIARRVERAPFLTGDEAKLIYRMPNGSIDRGKLIEDVCDRYGLEEHQVLESLSKLESRGIVEELLTGGVILTRAGQHLKTAIHRGQTMEILKLRHPITPVATRLLKAVYDLKREGVSAKKLSKFPKTLLKRADVTLDQAKKAVGLLRRTKMMSGWKITEAGEELLRAFEVLQEAPEVRQHPEEAA

SEQ ID NO: 42 - protein, 317 aa, Methanopyrus kandleri
MRALALLALVLAAVGGAAAEEAPLYGVLTHPWTFQLSANQAKQIPKEYVISVEAPAGAQLPLGKAYYGVFVADGNHAALIVDLTPAVTGETDDAVVVDPNAMSGKLPPAVKFRQWKPAHLAKGALLALSLETKPLPVGLSLKMVAPEELTIEVGKFQVKLNRELLEGLARVLATHEYGHPHGKKKTPVGYLQALVFKYFVKASVTGAEPEELQKLEVSEEEKEGEEEKEVDEETGYALRAFLEVNEQQGLTDLKAEFSVDNLENLIGEAVTVLQDVLSSPEAQQAAATAESALKKFVQVPVAAVCLLGIALVAVRRR

SEQ ID NO: 43 - protein, 444 aa, Methanopyrus kandleri
VKVSEIVSMLARILAEHYRSGVSLKESFYRALDNPFSIPSHRARAIHRRLMELGKRLGLCEEILDDVIQSGSFEDLGPELKGVLVTAADEMLFEGTSPALVTDAATRVAKELVSDRVADFVHAVCFDLEKYDVDRLKRRGYDDLCLRHYFPPDFVDYVRRVLPEDEIEDFLRACNKPAVKYVRVNTLRADVDEVRERLAEEGVLTEPDEHIPDLLRVVEEEIPIVRTEAWKEGLVFTQDKASAAVAHVLDPQPGEFVVDLCAAPGGKTLHALCLMEGEGEILAVDKSDWRLDAMREKLAWQRVPDGVVELRCADAREIPEELDEEADRAIVDPPCSGMGSVQKRPETRWNVTKKRVRRYAKLQSELLEAAIKTVRPGGIVVYSTCTLTINENENVIRRVARRYDVTIEKVNLQFGRRGLVPGTRRFYPHTDRCQGFFIAKLRKN

SEQ ID NO: 44 - protein, 335 aa, Methanopyrus kandleri
LYEDGEKFAAFGAYYRREKGCKVMKAAVDAGFVCPNKDGRISREGCLFCPKMGRTIITPNVDPRKKLEEQARKQMEVFRERYGAEKFLVYFYPATNTYAPPDVLEELYNRALEMEDVVGLSIGTRPDCLPDEVLDILEGYVKEGYDVWLEIGVQSYHHRTLRRTRRGHGLAEVIDAITRAKERGIRIVNHIIFGLPGETRDEMLETVRVLSVLGVEAVKLYPLVVLERTDLERMYYDRRYKPLSYREYIRLLADALERMAPTVLIQRLSKDRAPDEERIEPEWDLYRMRVISDVRKELARRESRQGELYKVGLSAEELVPLVKGATGAERSGVST

SEQ ID NO: 45 - protein, 367 aa, Methanopyrus kandleri
MPPKWYRHVMRVLSESHVVLEVRDVRYPEETRWEKLPRLEDVFDFTRVVVLNKADLVPRAETERVKEEVELEEDVPAVYVSARERMGFRHLRRTIYEVAPEDVETVRVGVVGFQNVGKSTIINALTRRSAAETSRRAGYTRGKQWVRGGRKLLVIDSPGVIPTDEAAAEAVALDPDVLEDPVEPALGVIERVVREYPGALSDKFGIDESMDPERILRDISERLGKDLRTTAKLLLREWVDGSLVEIYRTTRADLAETSELEVGGTAQRLVEETLREIEEVVPEGIPPSAATVRGILTRLAHGENVDGVGFGTIRLGEYGVGVSVGDRYYDRMVRRLRRELGGEVISEERFRVGANGRKAVALVTKGR

SEQ ID NO: 46 - protein, 181 aa, Methanopyrus kandleri
LIALVKSVEEYRRLLGEVVEEGDVVVELGCHRGAATRIILTGSPRRVVAVDYGKDAEEAMRELERSHPELTFVKGDAREYDTLKRVLEELGGPECDVLAVDLGGGMFPDTAFKVYYVWSVTLRPRDAVVRNAGLCEFLKLAELREEVHLDDENRGYLGELSPPGIPGRIRERFEEFKLWRG

SEQ ID NO: 47 - protein, 360 aa, Methanopyrus kandleri
VFGRLVIPGGCRKVLVRVWGGRVKDLRNCKLCAWECGVDRLEGERGVCRVTEPVIAAKQLHPAPPASYTVFMAGCNYRCLNCQNWDIAHYPDNPEGRALGYQDPKELAVEAVNMIETNQGRMIGADRIFFSGGEPTIHLPYIEQVVEHYRDTTDLWKVNFDTNGFATRKSMRRIVKLADSITFDFKAYSDPLHRAITGARVEPVLRNLEFLIPKYLDKIWEVRILLIPKAHDTEEIRAMCEFLADLDESVPVCFLAFRPNFVLERHPGAPKRLMERAVEIARECGLHATWSGMPGINGSVPPEVGECADKLLKHYDGRKGAALMGGYARVTGCRNHPRDCLACDDMARCPIKRYVAIRRT

SEQ ID NO: 48 - protein, 193 aa, Methanopyrus kandleri
LHWEGEKRRRLKELERAIERGEVDEAAIPVLETLNSFEEYCTTSSCSGRVVVLHEPEVGDKIGSEFVAKWHEPPEPEEVREAVLKAPEEGITWVKAQPPLFHVMCRDLEAAVRLRNIASEAGFKASSIRSVKSSKVIVEILGGERMDVPAKVNGKLTLREKAWDSVVALCNDILRSGHERLSRLVEALKGLSR

SEQ ID NO: 49 - protein, 1221 aa, Methanopyrus kandleri
MVLKRAADMVPKGFRDLVEPILDDCADLEELADRVVETEMEPDEVRRRDVGNTDSNEPVAIFGSSCVLCGGDCSSVRLTSRIGICERCLPVDTETLREVLKEARKRHGYVGEALLMFILVERYSPDRVEEFFRRYVWPELFTEIVDRVFDRATGFRLYSAQRVWTRRLVKGCSFSILAPTGTGKTSWGSLVAAVFGHAGRRVYYLVPTTTLVRQVENRIKGFARDAELDVDVVAYHAAMPTQAKREALERISSGDFDVLITTAQFLVHRVEDLEKLNFDLILVDDVDAIIRGTGRNVDRVLRVAGLEQEEIDSAYRLATLRRRYYSLRDWLRSLEDRGDKRAERVREELREVEREIEELEELLKRVKKERDLARIVFMSATGAAAPSRRLAVVRELFDFEVGAGGEGLRNIQDIAVISEPSPEAVERIVRKAGVKGGLIFVPQRLPGEKKAREIVEELAEHLRSSGIEARAIHAGTPAEEREEAIDGFSEGDVDVLVAVASPYGVIVRGLDLPQAARYAVFYGVPRQRIRLTPREEDLKDPTYVASALSNLARLLDDRRARSRLEGVAGRLWRIIRRGTWIRERLEEAVEPLSLNTLMKLAKRDPEDIAEQLDVDRWLARHVQTLAEGVRELTRLLGDPDRVKALAEEATTVAVYEEGEEAYLEVPDLRTYIQASGRVSRLFAGGVTFGLSFVLCPEDERELRTLNGLIRRMSYTYGSEFEWRSYPKSLDMKEIGLELKEISDEELEELVRKVDEDRERVRKVLAGELKPEETGRLARSALMIVESPNKARMIASLFSQRPSRRRLNGGVAYEAAADGLHLTVVATQGHVADLVEEPGVHGVLRIDERWVPMYDVLGRCSECGEQVVGSEECPNCGGEVELKTPLLESIRELASEADVILIGTDPDTEGEKIGWDVFNYLGWTTAQVYRTEFHEVTRRGISEALKEESWKNVDAGRVSAQILRRVADRWIGFSLSQDLWDVFKHLEIKLGELPSGSRIEVRLDIPSGVEVVDFRRTFDEDSSVRSRSVRLRREGDEYVVRTRISRGGDVTYTATLLDPNRKLGDRNGVRPELVRVRASVNGEPVDPNVKLEPMTWLSAGRVQTPVLGWIIDRAREYRETEFYACRAEVPADDVTIRALIEELKVPRALTEKLDEATIRVLSKIAEEGPDAEFSEEEVGRFTETELFERKDGRYRLSEEGRKVLESEGVIGLMLHLAGVSGR

SEQ ID NO: 50 - protein, 306 aa, Methanopyrus kandleri
VIRAIATVDENASYIAFVETPSANEKLLDVMSREKWRELGMFVLDHHGQLSEEPSAVAQAYEIVKEHTEFPLVRKVVIEPPVDADMVAAVLLLKQGPVLPEEDVEVLDKIDRFGKHYPSDEELESAEYALAIMQAVAEVVKKPYPDNPEELKETFKKALRTVERVVDDEKYREKLASKWLEEFRKSVREAEESTEVIEEGEVEVGNDRIRWCAAISEAQNAFTYLYREGYDLVVLYSPVMKRVTVGLADPELPIDLRELFEYLNEHHREGWGGRKNIGGSPKNYEIDEEEFKDIVSFIHEWLLRFS

SEQ ID NO: 51 - protein, 305 aa, Methanopyrus kandleri
LDVEEILRDVGVDPRYVAILDDTVVALNPRRAGLTVSRREELRREGIKVVRSKVVERASSRFHQVVTDYDLFEPREEVVVGFSGGKDSVTCLLMLEPLTRRLGLRIRPVLVETRLHGDPIWGREGREVCEEICRSLGFQLEYVEPREDVGELAEEHGESPCLICSLIRRRELRERGDKLVLAHTLDDAIVTAMASAIKGEGLNILRPVEELGGMRSEYVDYDFPETTIVRPMIRVPEVWTRLIPGEVGLPIFESDCPYSKPYGTTLRGKVAHGLEWLRLEVGADSVEFLDRLYRSFMKTLEATRG

SEQ ID NO: 52 - protein, 210 aa, Methanopyrus kandleri
MSLTMLMFLLNVLAYVLSVGPDGIIRPDVLYSYGLYLHNITVHPECLITYMFLHANLIHLLFNMLGLLTFGVQLERVLSTSEFLVLYLLSGLMGGLAQTALTPDVPVVGASAAIFGLLGCLTMLRPMSMMMFLFIPMPLALFAVLYAALALFVIQSGVVTQVAHAGHLVGMIVGGVLALLYRPSEALKGLLAVAAITALLLAGYWFLTHP

SEQ ID NO: 53 - protein, 431 aa, Methanopyrus kandleri
MAAESIAKAVHDVLATWGAQGPGAIFFLVWAAVLVVGMQLGFMFLEAGQVRTKNVVSVLMKNLLDLSLGGIVFIFFGFALAFPDYAQSIGKWIATMFTANPWSADPMKAADPYNLAYCFFQFAFCATAATIVSGAVAERINFKACLVMTVLITGLLYPIFVLWTWGGGWMGGDTGLFAKVFGQPYHDFAGSTVVHAIGGFLAMAAAYLLGPRIGRFKNGKPVPIPGHNIPQAFLGALFLAITWYGFNVGSSAVLYDPTNESWISSLVATLAMCGGAAAAAFTTRFDPLWAANGLIAGLVAICAGCDIMSPFGALLTGIVAGLIIKPAFRLLEKLEIDDVVAACPVHGFAGVWGAIAAGIFGAEALGGAGGVSLAAQIVGALVCIAWALGSGFATFYVIDKVIGLRATEEEEKGLDETEFGVSAYPYMETRD

SEQ ID NO: 54 - protein, 117 aa, Methanopyrus kandleri
MYMIEAVIRPEKLDDVKEALDEAGYPGMTVIHVKGRGRQRGIVHRYRDEEYRTDLLDKILLKVAVPTEDDVEKVIDVICEHAKTGRPGDGMIFVIPLEDAVRARTGERGDDALSTEE

SEQ ID NO: 55 - protein, 305 aa, Methanopyrus kandleri
LLHADVLKVLRKQGYGLVGKHSAVKPCHWCREAIKNGRHCYKAKFYGVESHRCLQMTPTVAWCQQRCVYCWRPVELTVGTHDVPDPDDPDLIVEESVEQQRRFLQGYGHLEGEARKRWKESLEPRHAAISLAGEPTLYPRIGELIDAFHSHGFDTTFLVTNGLRPDRVEELEREPTQLYVSLDSPNEELHRQINRPTIPDSWDRIMRTLELLNSLSCRTVIRITAIKGWNMEGTAEEFGELLADVEPDYVEVKAFMCVGWAAFRMSPDNMPSHEEVRKFAAEIAEHAGFELVDESPPSRVALLSS

SEQ ID NO: 56 - protein, 187 aa, Methanopyrus kandleri
MPKRAGRVTIGLYNSYDPRRFHEIHARTIARAAPLCVAFDFKLALFGFPLDDLGVETPHELAEYVAEETTIGASGREVLVLAERNLLEVYDYPVRGFPPQLGTIVGTTCRPDERKAIEPEDVVREILRPRSVTLVFGLGRRGLPAEVLEACEYHLDITGRRISLETATAIGAVTAVIGHLIKKELGE

SEQ ID NO: 57 - protein, 197 aa, Methanopyrus kandleri
LKLREVKPEIRVLGIDDGYYGPEDDRALVVGVVMRGGQWIDGVMSTEVTVDGLDVTDRIAEMVNRSKHRPQLRVILTDGITFAGFNVLDIKKLHEETGLPVISVIKRRPDVASVVSALSNLDRTEERRKIVLRAGPVHSVKTRRDEPPVYFQCAGVEPDVARVVLKRTATRHRLPEPIRVAHFIATGVTKGESSSDA

SEQ ID NO: 58 - protein, 112 aa, Methanopyrus kandleri
VKLPEVEVVVKKYDKDEVLLELPGEDHTLCNLLRWALNRQDGIIATYRIEHPILGKEHKVDEERYVPPKMRIRAVDEDADAREALERAIEELLELVEEAKEEFSGALEEKES

SEQ ID NO: 59 - protein, 226 aa, Methanopyrus kandleri
MPKMEKREITFTFPDRDSAQRFLRAVEATQARGVDTVVELRGTRVKVKVFGPHAAVKAHIRKLGELRRTVLSESEEEKQVRLHLSTICREAGAPKIPSELLRDALRRRGYRVRVRGPWITTNAPMSELREFVRELAEAYREARFYAASEPVRRMLAILSHEYDVDPMDLAYEAIERGVLREGEDGRCELREDPKSTERKLEEIASELRKARKGRGKTLEDFLHEPL

SEQ ID NO: 60 - protein, 196 aa, Methanopyrus kandleri
VRRYVEPGKFVLPGDKITVAEAFYPGPGTYEDGGVVRAAITGRVEVDLEEREVRVEPYVDTPPKLKRGASVIGRVQSVKEQVVLVKICFVDDRTDREPPTSGVGGIHISKVRDAYVEDLADEFQPGDIVRARVVSTKMPVQLSTVGKEYGVVLAYCTRCRSELEKVKGRTLRCPVCGHTETRKVAAGYLREAESDA

SEQ ID NO: 61 - protein, 340 aa, Methanopyrus kandleri
LDPTKEVRNALVPHLKKLKDERVAVISDIDVDGLASAAILGHVLNNVGADFVLYFSPPANFEEVVSGIAPECDVLIAADLGSTGETAIHDAKSEGCRVIVVDHHQVLEDVRPDVFIHDTRLCAAELCYWATVDLHERDLRLIAAYAAFTDYAEEYSRVLRETLKMYDRRKVYTEASLLDYALIRMDGEDRRELALKLPETPVSELDEVYELARDAMAEEHEVLRRAREVAECLNEVVAYAIMDDVHPAMTGRVASHVAGVKRRPVGVCVRRGKISARVVEGEEIDVARAIRKAATEVGGKGGGHAPAAGGVVPESRVEEFLRLFGEEVKRQVESARTRKS

SEQ ID NO: 62 - protein, 204 aa, Methanopyrus kandleri
LIDRRLAMELDGLEGFPEPKLSLEQYETPGEIVRVLLSIADREFGLECSRVLDLGAGTGRIGIGAALAGACEVTCVEVDSKAVEVARRNVKRAGVEDRVEVVEADVRDFEPEDQYDVTIMNPPFGAQRRGADRPFVEVALEASSGVVSLHRAGTEEFWKRRARELGATCDAIGVVRFPIPAMYPHHRSRIRHVDAVVLVFKKVD

SEQ ID NO: 63 - protein, 62 aa, Methanopyrus kandleri
MMLPEHIICASCGKRVGRKRTPPECPYCGEKKFVRMDPEERLGKGPEWWKEAERERRVRERL

SEQ ID NO: 64 - protein, 270 aa, Methanopyrus kandleri
MPAGPVHLVYGVLLAVTSYPQNPEYGGMIVYASLAPDFATAAYNDRYSDLRYVDYRWAHDPTHVYDYASVIVERTTSRTLQGVDEKVALWCAETGIASHLLLDLYTHVKTSPIKEWREQAGIRTVLQEFYYPWQENAVEFARWALGRAIRVFGNPDEFWRYVDGACAVAEQLMGDYVISAYLRRLSERYFGDPDLHLADWLRWFYRNYGWEENATDAFIIDGVRIPADPVELLSWISQWDPRVVPMRPPQSGGGGSLLLPVFPVPPVRRR

SEQ ID NO: 65 - protein, 125 aa, Methanopyrus kandleri
LPRYLRRRRRRRFLDGGDNDDDPLTGVANLFDAAMVFALAFIITMSSSYGLTKILSPKTSEATIITKTTTGKVTVTKIYRTPSGLKVEQFKEVARAKRGGAQLGHMKKLGGAVYKAGKKYIWVPG

SEQ ID NO: 66 - protein, 202 aa, Methanopyrus kandleri
MVSIATAITQALYVVMELLFYPTIVLLLLFLAYSLMELAIFLREVAYRPRFTRKDLEQIADKFPDVKRLPPHFSEFLRRVEKIVEKSDSADEASLKVEKELENLENFLASKVSRTRIVVRLGPMLGLMGTLIPLGPGLEQLAKGNIAGLATSLITAFATTVVGLASAGACYVITLFRSRWYRKDVSDLEFLAETILQREFGG

SEQ ID NO: 67 - protein, 404 aa, Methanopyrus kandleri
VFHGVIAAFTTYLGASAALMLRYHSVGVSEALTYGAVYGMAAAAIGVGTGVMLTRVLGARKKRREVIRTVLEGTALSGVALLVGLLDVTAGAIAASSVALVYPSYRISRDLGVSPFKIVTLLAVTSSVIVAALTSWMIVPAFADNPIYALAIAFFVFIVGLKTGLGIGFAGFQLRRGAMVIAALSGILIPAIIGLSHLVSKFMKTALAMQRYALLGHALLGLFLIGLGIFIARKWAVEGSAKDLSKLGAFVVAVPCPICLTGVALSIAMYAEIGALNVTQAALVLWTCFVSTAYATLIVADAVIEVLKVPPAVALSGLENLVGLLFVITGIIAWAYPLWKRAPKLKLALPSPSKIGPWALLFLALMAFGYLWAVRKASRGNYPPDNPIDDIIRAVIEWLASRRR

SEQ ID NO: 68 - protein, 204 aa, Methanopyrus kandleri
LRWKVTAALVATLVISPALVHGSFDHRFQKYLRMERLQSAVSDIDGATKDVATVLASSPYLAYKAALYDNTLRVGNDPGRDRLELLSAIRSAEHKLELARLKIRKARAKGVTGLDRAERNVSRALSALHRAEDRVEKRAPGVTDDLREIDALTPVLRTLTERKRWLVQEITSKLPKFKYYELSENLLYLPPFNILFPLVGAFGP

SEQ ID NO: 69 - protein, 91 aa, Methanopyrus kandleri
VSRIGEIVTEMFQDGRLFLGMGEYAQTVAYDELLLWFDVLFDDEHILDEGDRVERKVGKLLTALYYGTVGYTVTEHTDEGNNSWIYVHAHT

SEQ ID NO: 70 - protein, 698 aa, Methanopyrus kandleri
VREPTREESEEIKVVDAYVKRFQRLVQLEREAEMKAMEEEIRKLSGKEREKKGRAVLGLRGTRAGREVGGYYLVKYGRSKEIDTQISVGDLVLVSRGDPLKSDLTGTVVEKTKRSITVAFDSPPPKWAVGKGIRIDLYANDVTFQRMMEALERIRHAEGRLRELRNTIIGLKNPSDAEPIDVDFVDTDLNYSQREAVEHALGAPDFFLIHGPPGTGKTRTITEVIVQEVRRGNKVLATAESNVAADNILEYLVERGVEAVRVGHPARVSKKLKERTLSAIVENHPLYRKAERLRERAYRLIEKRDRYQRPVPRWRRGMSDETILYLAREGKGARGVPPRVIQSMAKWIHINRKVQKLFEEAERLEERAVREVLEEAEVVVTTNASAGLEFLEDIEFDVAVVDEGSQATEPSALIPISRAKRFIMAGDHKQLPPTILSEEAQPELSRTLFERLIEKHPKLSRMLRVQYRMHENIMEFPNREFYNGKLEAHSSVRRHTLEDLGVGDPEVGRPWADVLHPKEPLGFVDTSRLPERLRRERRRPGSKSRENPMEAAIVAFLSEQLVRQGLSQEDLAVISPYDDQVDLISKSLDELGLGDVEVNTVDGFQGREKEAVIVSFVRSNPKGEVGFLRDMRRLNVAITRPRRKLICIGDSGTLSSHPTYRRFIEHVKRSGALIKPNNLREVASYLDLVRLAPGRARG

SEQ ID NO: 71 - protein, 253 aa, Methanopyrus kandleri
VRPFLSRLRALISYIKKTYDRVAVAYSGGTDSSVLLYAAVKALGRKNVVACTACLPYVVNVCPPTPMDVKQIRIRPDVEDVLREGRDEHPCYLCKRAIYEAIHETIGGVDGVLDGTNVSELTRGRPGLRALYELDVDVPMIKCGLGDQTTSVLAAYLNLRARSGACSLVLSPEWPDVEVNDPGKLNRTARLRKPQSERWSLSECLEFTIHAPLPERRRERYECVRRGDALVFRVLSGKVTEALASYFRECWNV

SEQ ID NO: 72 - protein, 389 aa, Methanopyrus kandleri
MIGRIFRRESKVVRDRLMKIRQTIDATEVDPTAVAETIGGPMESSSRSTEEGSEKARQDEVEEEPSRESHEESSAEEHSGVSAEAFLEMYSTRKGTAAVVAYPLYEICKTLCLAGILRRKTRKILEDLTAVRLPLLLASHNAVGPTSDLLEGFPPKASGYQVASPYSADALRSLAPESIAVMGYKSGHVGAEPLRGWKRMPNVCSWGVEAAVADELWDQAPVAVAVTDTISALYGVYLSSMLDAPALDFSYLWKFTKGKPLWRDPRGGKHAIQWTQWKFLRELKLDYLIVVSCLKDRRFKRVVRTLESEIKVKIVPIVSEDPRELGELLRTTLENQVPMVGGEVHRTFQVEPVLVEFVKRAILAPLPVSDFNEAKSSRFYPLIIDISIE

SEQ ID NO: 73 - protein, 292 aa, Methanopyrus kandleri
VETFVLAHNYQRPDVQLMADSVGDSLELALEAREIDADRIVMCGVDFMAEVVKALNPDREVVVPDHRAACGMAMRLRAKELREFRREHPDAAVVVYVNTSAEVKAEADVMCTSANAVEVVSSLPEDKIIFVPDGNLAAWVQKHVPDKEVIPFPEHGCCPVHHSLSPSDLRELCSQHPDAAVVVHPECPLEVCAMADFVGSTSQIRQYCEKEDASKIVMGTEEGLAFRIRRETGTEVIVPGHMVCPDMKINTGEKVERVLEARHVPEPLRVELDPDLISQVEEVVEEMFRLTR

SEQ ID NO: 74 - protein, 289 aa, Methanopyrus kandleri
MMIRGDRLQVATDVHLHFNPVKGDGYKVFEKFHRAGGTGFVSPVLTLRSYRIHGYGREDFERAYRLHLEGVRYGRLEYPLRGYAALGWHPAEVATLAEEHPEEEVLNVAETVCDLIEKFAAEYEEVVAVGEVGHPHYPVPAEVKRVCHKVFVRFLELAKDLDLPVIYHGPKASRKHYMRLYEYLKDVGFDFDRFVRHRATPDVSAARNVGIWPSVPASRRSVREAAEHGPEFMLESDYLDDPRRPNAALPLRAVPKAARILRTIDPDLVSEVMIEIPERVFGVEFEPLG

SEQ ID NO: 75 - protein, 311 aa, Methanopyrus kandleri
VWVELRRKYGRDRGHAPMSEEDVLRVKPKERPGVVFVTPDGRVHADLGHVRMVEDTVTLHSDPTEPPGPDNPSVIVPEHVLAALYVSGYAGAVVEIRGDPGHAEHVWRADCYLREAVEELGGPADPPEMGEPAAKRAFIREGEAPSTVRNVEGRIEPAEEFEVRVGGEEVSVHDLMTVRRGNVSNKTPEHAGLDVVADVAMLAGTACARVEISRPTEVTSIHPTDLYLATAAKHGIRVCSLNVGRMRGAVNLEEGETVRVGTDLRYEVCITEEPVASEIKIGDVTLVREGGKFRVVEPGTVRLGDEVVEVG

SEQ ID NO: 76 - protein, 275 aa, Methanopyrus kandleri
LIDISSLSWAVALGVVRGLYVFAGSFIAAAVYRYVAEERIRMTTSAFMGLLTAGFAAGPKELTALTYQNPNVEMIAWAIATLFAIPARTYGDAIGERILRARIRASMNPRTKVYRLPENPNEIKDIPGEPPAPMEVKERIAGREYEFPRGTPKEEVERVIKRDLESETGIGRAVVRVRNGDVEVLVAGAKPPVSHTLPPDKVAVSVEPLGGAIHIGEGDRVRVFVDGRELGEAEVWRRVDDRVVLVMEERTAEELLKEITQGKQVSLMAVRGEGS

SEQ ID NO: 77 - protein, 385 aa, Methanopyrus kandleri
LELVLGTGAGYSVEEDGVEIPSDWKELAEELADHGGTPVCMVIGPQDSGKTTLVTFIANELVERGLKVGIVDADVGQSDVGPPAVVSLGIVEDTVHDLSEVEMRHGYFVGSITPSGHLLQTTVGTRRMVDLALAEGTDVVLIDTSGMVHGGPARALKLHKVDAIRPSHVAFLDRDGQVSHIKRMVKSLKYIKVHDLAVPDAVKDVERKDRIRRRERVLREFFEEREILELDLEEVSVQRAFIGTGEPVDLEEESELSALIKAVSGVEPEILHAERAPDAVVLVVKDQAGRIVGRGGRHARELRRLLNVREFVVVNEEELQGVLVGLCDGAGDLLGIGVIREIDFASGELKVEGRLLRDRTIRVVQLGSLKVDPETGSHEPMNVRV

SEQ ID NO: 78 - protein, 332 aa, Methanopyrus kandleri
VTRMYVGIDHGTSGIKVAAYDGEGDPEFLGKAPRRKVAERGLLRSLPDEARRAVEEAECICLNYGMGDALTEFTPLEEAEDLGVGYGLRDTSGAGREFGAGRRMVEELSELGVEAYLAPGIHRDLPRLDGAFRVFSHVASGEKLGTARLALELSSSKDIVVCDTSSNTVSVVVKDGEVIGGIDACLGAPGVLQGPLDLEAIRRIDAGELSANGAFSTGGIVKIVNCAGEDPESAVEEFIQRCGKEEKEWLARLVAWEVAGLGVVYDCDEAWIGGTLSGDDEFMGVLERVLSKAFNKVAGLPPESASMGLALIAADIASGARSVLGVRISRRP

SEQ ID NO: 79 - protein, 270 aa, Methanopyrus kandleri
LISYLGPPGTFTEEAAERFSEEELGGNGKLQSARTITAVFSRVERGEADYGVVPWENSLEGSVGETLDNFLHRSVRVFGELVLPIVHALMSGSEPDDREPVVYSHPQAYEQARETLRELLGNHEFVPTASTAEAAKLASKEGAYALGPPRLAERFGLDIMEEIRLENNETRFAIISRRDRAPTKEDKTSVVFSVTDRPGALREILGIFADRGINLTKIESRPAKRGLGDYVFFLDFEGHRMLYPGSEALAELRERTPFSKVLGSYPKVFP

SEQ ID NO: 80 - protein, 183 aa, Methanopyrus kandleri
VIEIRIHGRGGQGAVTAAEILAIAAKEDGKYSQAFPFFGVERRGAPVTAFARIDDEFIKIRSQIYEPDHVIVLDSSLLAVVDVTEGLPEDGLIVINAREEELDKIMEKFEDSDVYTVDATQIALDELGVPIVNTAMVGAYLKASDILTLDAVKKAIHARFSGEIAEKNVRAVERAYREVKAVG

SEQ ID NO: 81 - protein, 89 aa, Methanopyrus kandleri
LGNEEFTIGAVVREPGSTKRNKTGRWRVFRPVLDQEKCMNCGLCFMYCPDGCIRPSDDGYVIDYDYCKGCGICESVCPVNAIEMVLEEG

SEQ ID NO: 82 - protein, 383 aa, Methanopyrus kandleri
MTEVHVINGNYAVAEAVRMVDVDVIAAYPITPQTPIVEYLSEFVSNGELDAEFIHVESEHSAISAVLGASATGARVFTATASQGLALMHEILFIASGLRLPIVMAVANRALSAPINIWCDHSDSVAQRDTSWIQLYCESNQEVFDTVVQAYRIAEHEDVLLPVMVCLDGFTLSHTLEPVELPEEEEVRSFVGKYEPTHCYLDPEDPMTLGPVGGPDSYMEFKKMQHDAMEKAREVIGEVNREFSDEFGRSYGDGLIEEYNTEDADYVVIAMGSVCGTVKHVIDEERPDVGLVRVKAYRPFPGDRIVEVIQDKEGVVTIDRAHSYGAMPPLWTDVKAHAPDVDVSSTIAGLGGRDIRPQDVLEIIKVAEEGKGMDEPVWINVKV

SEQ ID NO: 83 - protein, 296 aa, Methanopyrus kandleri
VGNKRRVPIPEEELMAPGHRACAGCGSALCARLCMKALGKDTVVVMPTGCIEVVTTPYPETAWEVPWIHVAFENAAAVASGIERALKALGKEDVTVAVLAGDGGTVDIGFQALSGMIERGHNIVYICYDNEAYMNTGVQRSGATPYFAATTTTPPGKIWKGEMRPKKDIPKIIAAHGAPYVATACVSHPQDLIKKVKKAKEVEGPAYVHVLCPCPPGWGHDSSETIEIAKLAVETGMWVLYEIENGEFRITYRPKERKPVKEYLKRQKRFQHLSEDDIEKIQRMVDEQWKELEGKE

SEQ ID NO: 84 - protein, 175 aa, Methanopyrus kandleri
VEGARREGVKAWVGLPGCIGCVLCAEACPIGAIEIVDGRPQKCIHCDPERAMCARACPHHAIVQVCETLVVDRDRCNGCGKCAEACPVGGIFIREDVAVKCDNCLDRDYPACVEVCPVAGADVAPVNERVLWRRSRAARTLRNLPGSGGHARRLGSRAARKHSRSHSRSVARGRN

SEQ ID NO: 85 - protein, 303 aa, Methanopyrus kandleri
MPDDSDRELLESIAEATVEALRVAETKLPDDVLERVERALEEEEDDHARMMLEAILENVRIAEEKGLPMCQDTGLITVFAEIGREFPLRLAGTIRDGIEEGIRRATEEIPLRPNVVHPISRENTGDNTGDRVPIVRFLPTKGEELRLHFLPKGFGSENSSAVTRLLPTEGLEGVREFVIKTVREAGGMPCPPIVLGVGVGGTIDEAAHLAKLALFRPLNVRNPDPEIAKLEEELLEEINRLGVGPMGLGGRTTALAVNVELAYTHTAGLPVAVNVQCWAARRATAIVYPDGFFEVTQREYPRG

SEQ ID NO: 86 - protein, 177 aa, Methanopyrus kandleri
LTEHHLEVPLEKEERLTELEVGDVVYLSGTIITARDKAHQRIFEEGEEPPVDLEGAAVFHAGPVVRRVDDGYELVVIGPTTSTRMAKYLEDIVDAGVKLIVGKGGMGPDAPEVMKDRAVYLTAPGGCAALLAERVKSIREVHWLDLGVPEAIWVLEVEEFGPLIVTVDAHGNELAGE

SEQ ID NO: 87 - protein, 198 aa, Methanopyrus kandleri
VYVGRFLLAGKLEDGTPIAVYGVCSRSFSDRRIEVREGAAFVVPEDPSYITENPYVTYTCARIVDEFLVLTNGAQTDPIADKLESGVPPREALVSVTFAMDYEHDEYNTPRISLITDGETFWLGRVAPEEVYFRVMKPKDGEGYLLSVYGEYAEVPSKPNMTLDREDPLECDPVPSFEHYVCSVIARHDGGRWSLEAR

SEQ ID NO: 88 - protein, 671 aa, Methanopyrus kandleri
LKAWSKEAMTSFDVRATARELDSLLEGALIDKIYQVGERELKVKVHVPGVGSHYLVWEPGMRVHLTWRPKPSPDQPTSVSQALRNTLSGDRIERVTQLGFDRILRFDLRSGRRVHVELLPKGTLAVTDENNVIERAFPARRFRNRAVVPGEVYEPPEGPPDPYELDRDAFLELLLEADRDLVRTLAVDVGLGGLYAEEVLLRAGLYERRESHASEFEEDELEELYETLRDLLEQISEGDLRPTLYRTTERDYVDVTPVPLERYSDELEMEEQDTFQRALDEYYVTKFLAEKEREVREEWEREKRRLERTIERQRSSIEQLRTKAEKLRGRANALYLNYNLVDGILSELRKAERKGYSLDEIKRRIQEAKGSGIEEVERIADIDVENRRVILRLPGENGEVTVPVPIDSDVHSTASKLFDRAKELERKAERAQEVLREQERELEKLLEEGPPEVELEELTVELTKRRKKDWYERFRWFISSDGFVVIGGSDAHTNEIILRRYLEEHDILVHAHVHGAPHVVIKTEGEEVPETTLREAAIFAASYSRAWRWGLKAADVYWVTADQVDKSAEAPHGGAIIRGKRNWFRRTELKVAIGVQEVEGGYRVMGGPVSAVKKHCMTYGVLEPGNERKSDVARRLFELFKKEVENLRRYLTVDDVMRAMPPGNARLLEVG

SEQ ID NO: 89 - protein, 393 aa, Methanopyrus kandleri
LEIFERPVEEIMTPAEEVITAEPGEPLSKIFSKLERHGVKEIPIVDDGKVVGMISYYDVVDAHVADISNVRPETVMMKPETVTPDTLIVEAITEMIDSGLRALPVVEDGEFVGLVTEYDIIDVARESDELTKIDAREVMSTPVITIHENDTIAKARAIMRDHGISRLPVVNDANKLRGIVTTTDIIREVIKPITRLGKMDRKGEKVPAFGHPVKNIMSSPCVRAEPDETVVDLCEKIVEHGIRGMPIVNKLEEPIGVVTRRDILRKIPELMRKRGVFVSLKGVDDVDDFTLVILRKSIAAAVQKLASMRPSIEAVEVHIKRYHEEGNRHKYSVRIHVKDARNVISVKAHDWDLIIAFKNAIRHLVREVLGEEEKEETVRRKEAVKAKIKRRTA

SEQ ID NO: 90 - protein, 91 aa, Methanopyrus kandleri
MRVGDLSGEPEYKLALAAVHQGLGILAGYLCATGYSIVLVMALLILPFALGKVLERLLERERIGGAKGWLAYGLGAYLSAWILVWTYFINR

SEQ ID NO: 91 - protein, 599 aa, Methanopyrus kandleri
VVSIGRRVAVVDRERCKGGSKCDYVCQRFCPGVRTGRETITIDEDTNKPVISEELCSGCGICAQKCPFDAIKVVRLPEELEEECVHKYEEGGFRLYRLPVPKPGKVTGVIGRNAIGKTTAAKILTGELKPNLGDPEADPDWDEVIRAFSGTELQEHFRRIADGDLRPVMKPQYVEALPKVVKGRVKDVLEDVDELGVVDELIERLGLTEVTDRRISDLSGGELQRVAIAAALSRDADFLVFDEPCSYLDVEQRLSLARSLREIVEDRGIPMLVIEHDLATLDYVADVVHVLYGKRGAYGVVSKPMGVGKGINAYLKGYLEAENVRFRDEEVVLPEKPAEAEAGERDTLVEYGELVKEYDGDFRLEVEPGEIRVGEIIGALGPNAIGKTTFVKLLAGVLEPTGGGVDVDVKVSYKPQYLEVDSDEPVEQVLRRTAGSEWGSSWYRSNIVEPLDLEYLFDRPLCELSGGELQRVAVAAALSREADLYLLDEPSAYLDVEERINTARVIRRVIEARDAAAIVVDHDLLLLDYISDRMMVFEGEPGKHGRANPPESKREAMNRFLSNLGVTFRRDPETRRPRANKPGSHRDREQKRRGEYFYA

SEQ ID NO: 92 - protein, 183 aa, Methanopyrus kandleri
MITVLVLGDAHIPERAQEVPHTLKRKIEELAPVDVVISPGDYTTEDTIEWIASLGEKALMVVGNCDFGLPLPPRVTEDIGEVKVTVDHGSGVHPRGDPDQLAAIAEEEGADVIFTGHTHRPEFKEHRGVLIVNPGSLTGVPSGGGPSPGPSFMYGTIDGKEVWMKLYMLKGDRLETEEFETEL

SEQ ID NO: 93 - protein, 262 aa, Methanopyrus kandleri
LKPVEPCDLEVYADLRVPPNTHLVLRIDGRAFTKLTRRLGLKKPYDRRFAEAMAETAVRMIRDAGLGITLVYTFSDELNALIPRGNVPFSGRVEKLTSVSASCASTYFFRALQRHGIDPTGETVSFDSRCVVLTDDDLVDYFKWRQDEAWRNHLNSYAYWALRERGLKPKEAAERLRGMKAHDVHELLYREFGINLGRTPAWQRRGILAYRVAVNEDGVQRRRVTRDWAPPFFDESEGERLIRACASQGYVSLDPAPDQVEE

SEQ ID NO: 94 - protein, 262 aa, Methanopyrus kandleri
MKKLSLALVGAGGIGTTVLREIREGRLEGKVEPVLVCDRHPEKLKRIERWFPDCDTSTDLDDAMSAEADVLLEAASVEAAASLLPDALKRFDVIVMSVGALVLEEGLLSRCREVAEVTGHRLHVPSGAVGGLDVLRALRGRVREVTLTTIKPPKALNKDVSERTVLYEGSVRDAVRKFPKNINVAAAVSLAVGDPSLVTVRIVCDPEVSVNTHVIEVESSAGTYRFELRNEALPDNPKTSAVAAYSAVALIERMTEGIRVGT

SEQ ID NO: 95 - protein, 211 aa, Methanopyrus kandleri
MSVAIVEHLDRWSPWLDLEYMEAYRTARKHGWEFTVTNADPEVLAKAKYPALPYSASKLPLRGDRVIVLDPDAEDPLTPEDDPDVVIVGGILGDYPRRHRTREELTPRFPDAEVRHLGPYHFSIDGALRVALTVLECGVPLEEIQVVERPEIEVAPGHTVRLDCDYPSEGKPMLPEGLVEYLKEGIVDYEEAEFSARRRWRHRNDGVEGDP

SEQ ID NO: 96 - protein, 123 aa, Methanopyrus kandleri
VTNGESSNEEEYRKRYVRFQRLLGMEVFTEDGRRVGTVEDVTFDPRTGDLVRFLVIVTEQPSGGGLLPLPGGGGRRTETVDAELVKAVGDIIIIESPEKASSGEEGKRKKQESSPAKPSDLEI

SEQ ID NO: 97 - protein, 515 aa, Methanopyrus kandleri
VEVVGIHHGHDAGAALIRDGEIVAAANEERFSRKKFHRGFPERSLQFVLERSNDVDVLAVAGLYRKRKDLERVRDIAEELEVPVYLVEHHAAHAASAYYTSGFNRCLTITVDAAGDGLSATVWVCERGEMHRVSTESYYDSLGDFYANVTELLGFEPMKDEGKVMCLAAYAEPDLRSVEWIRREVIDVEEGNIVNRLGAISGEAVRRLKRSKLAKMGRERAAAVAQEALEELLLEYFGHYVNEYGENRIAYAGGVAANVVANMRLREELNIDLFVHPNMGDGGLAVGAALWAWAEEELARGRRPEPRRLEDVYFGPEYDREEVRKALEEHDMTDRAEYVGKDPDAIVRKLLEGKTVALFHSRMEYGPRALGARSILADPRDRGVVDKLNRDLGRDPFQPFAPTILSEDAPEYLRRPCESPFMTLAFRATDTFRRKAPAVVHVDGTTRPQTLRDELPFYREVIETFREETGLGAVLNTSFNPHGEPIVCSPRDALEAFEHGVADVLWIEGYMIERG

SEQ ID NO: 98 - protein, 235 aa, Methanopyrus kandleri
VPRPKVLYNVGMTADGKVVTAAGDSRISGEEDLKEVHRLRAEHDAVAVGINTVRKDDPMLNVRLVEGEDPIRVVFDTECSIPLDCRLVRTARDIPTVVLCAEADPGRVEKLEKRGVKVEEVGACEDGVDVERGLELLYDMGVRTLLLEGGPTLAWSFLKRGLIDEFRVAVAPVLVGGSDALTPVEGEGFPRVDLGVGLELKRVERVGRDVVLWYEVSGSAADLASEHEEARGRSS

SEQ ID NO: 99 - protein, 118 aa, Methanopyrus kandleri
MKCPECGTEMRSELRDDGVELLRCPECGKEIKRVPSYREFGLKCPNFFEMTVPEWDEEVLGKEVVVVVKYRSPDGYRRRKIRGKAVRIDNRGNLVIRREDGFEVSLYPQVVENIKVLE

SEQ ID NO: 100 - protein, 393 aa, Methanopyrus kandleri
VRAAVTMIAFVVLMSPVCAEVHILTWAGEGADSTCVARTKEIVDWWDTYRAIGPDTTIVWHYTTRVDRWRTVLETGTDPLTGARISVVYVPGGWHPERYWDFDWVRALYHAQIDLGIGYVGICAGAYLHAGNTTYSTSGPGHDDVLQDGVTVIDGMNGPNRICRVLILQDNPLTPEWTWGNVFTYKYWNGPGFGPEPGLEFNSSYKCWVKITNIEGREVMIKIWPVGEYVDTCKGWAIVAGQYFVKEGDKWVPRGRFVLFGPHPELTSRTGAHALLAKAILWAAGAKVPMEPQPSPVVQVVPKGTIPKALVAAVVATALTFVLPEDVKEELFTASDPITQGIFETISNVIQDKLGLEVPPEDLLTVTVATVVVYALEALIEWLFGTAPAPASA

SEQ ID NO: 101 - protein, 194 aa, Methanopyrus kandleri
MGLYLGVEGIDGVGKSSVVNLAAEFLEIHGLEVTTVREPSTDIGREALEWDDPYLQALAFTLDRMLTLKRVDFEAADVVLSDRTFLSTLAYQSALGADMRWLLELQRPVPKPDVVYIIDREPLAEDATFDKEFLERVRNRYREAARLIEEEFDVEIKWIEAEDMDKEEIAELIVADARRRLDDPLGIPDDLLEG

SEQ ID NO: 102 - protein, 138 aa, Methanopyrus kandleri
VSYRRGADFERQLVRYLREHGGEAVRVAGSGGAVDVVGYAPAMGHVAVECKVRRDDRLYVEKEEIEGLTTFAERFRAEPLIAWKPPHVRTGLPLNAVLFPPDLMEERERTYVIDLETALEEGIDASRLVTRPLDHYRR

SEQ ID NO: 103 - protein, 520 aa, Methanopyrus kandleri
VCGIACAVGDDDIAAMVTAMEHRGPDGRGFASVSDDGVEFSEEPPSEGEVVLGHVRLWVRGEASAVQPIVEEDRAVAVNGEIYNYRRFVEDAPSDSWAVFEVVRSVRDAAAALRVLRGEYAFVAAFRDGTVVAARDPIGVRPLYYCVEAGLAVASERKALWAAGFRDVRRVPPGALLVLRDGRVELRNVVDVPRSRPGRSSWKDLLEVLQRSVRERVEETERVGVVLSGGVDSSTVAKLASEYVDVKCYAAGFEGSDDVEVAERLCDEMGWPFVSVSLEDEFERYVVATVYAVETWNPMKVEVGIPILACAGAMSDDGIRVMLSGQGADELLGGYHRHLRHYGDWDRFSWELWKDVAAIHAVNLERDDKAGMHHSVELRVPYLDLDVVRTGLGIDPRENVSGPEDNLRKRALRRVAAELGLPDFVVERRKRATQYGSLTSKMLDKLVRELGIKRAVAKRLGYRSHKELFLRLVGKYLGFPWEAPSVEEVERECARLGVEPEISEFLEERVLTFDSDLRAG

SEQ ID NO: 104 - protein, 949 aa, Methanopyrus kandleri
MVVLAFVLILLALTPLQPVQGQEVGTLAEHLRKAYGEDWPHYAPWVHSEIKVADDVKAYNLRAVDLGYDLVPGVPAHGVLVAYASSSKVGLAFVNRTGEFFKLCEVPLEAPPKYREGLDLDYMEAEGDSTKKTVLIAWGADNRLYALRVKLGVYRPHENANFPAVAEVSNPIEIDLPPGYTDVKRVRVLALGDKFVVFFTARREDKPTEEYGYDLFYALIDPDGTVKLGPKDFGFQDIMVFQVKPLNGPSLIGLAFMGRWRQYIAGVWWVTMRLEGNSIKVIQTTLISDSDFEIPCVERALLDFSFYPINSDEYSVLVVWNDCRCPKVLFERIAQLVPGAEFRYRKDKTWVVYGQRLKVDKNGYTSKLGKNFPVMYLMTVTQTTTQTISGGAVESWDITFGEIDSVTVYTTHGSEEKYFVVDASIKVFDVAISKWLNYARTGEFEEKNTYGFDILSVPLPVNPDSPGIVGTEVDMADVEVSLTNFGTSQTKQKWVAYPVFNKGGCEIIPKDQPSPECFIYLYGTIQFNETHATETPIVAADQTDVKARLLPDGVIIEGFIENINKKPSLFVMPVVAVVGPVKDIYLEYDTPDELLHKYIYPLDPFTVLKFRPIRTEDHPGAQVGPVTYDLRSQQPALPTVYLEVSYTTDFSDRVPAGPALVEILGPAPPEEPTPGTPLSGYAIIGDPEVMRSENVEIERIVNEELAETQVHVKFLPPAVETLERIAQVVASGTIDREAVREAASDALDELSKYLKQYNLLQSPSGIPAEVDSALQTLGELRDRAQDMKDEELVMKLNTVINNLKRLVEGTYHVFVLYHPVGSVQEYPKSIENREDLKRLVNELAYTGVTSWIPIDVDCEVPNVVPPETRTETSGTALITEVPVVLPPTESHSSAPKAGSQGQRGTEPVKPRGSAGGTSSNPTPLLPIVPYRRGLSRPRLRRRSCTRRAR

SEQ ID NO: 105 - protein, 356 aa, Methanopyrus kandleri
MREEAPPKIPEGLRITATRTMAAARPEEPEPTLRLFRAFSPDRELVLEEKLDGTNVRVYLEGDRLLAHTRGWVDADEYLRGLDIEPPWEDLRGEFDRITILEGELLPYDLFSQESPRLHELAGRLETEVLFDGEPSDLTAELVYLEGKRYECRPEPLFSRVCELDPDHELIQRFLRENQVKPDFESAVAEGKLEPRVCFYELDMLEGSVKITAPRTEQLRECRRLSTEPPRWRVVVDPDPGDLERELDRLERNWCEGLCVKPMVETDDKLHAVKLRCPWFLRREFDGRPPRRGSHKVAGRITAQLLQTKVLHKNLRELEGKRGVLDKKWRKLSERTQRALRVQDRLLSLGLDSPRL

SEQ ID NO: 106 - protein, 429 aa, Methanopyrus kandleri
VTLMEECRRTVPDTVRKIAEEEGVRPEKLARRVAEGRVVVPAHADRRDEVRPVGIGEGLRVKINANVGTSPEVCDPDLEVEKARAAVDHGADTVMDLSTGGDLREIRRRIMKAVDVPVGTVPVYEAAVEMTRRGRAVVDMDEDDMLRAIERHMEDGVDFMTVHCAVTLDALEDVLRRGRALGIVSRGGAIVAAWMIHHDAENPLYENFDYILELAREHDVTLSLGDAMRPGSVLDANDAAQHRELVVQGELVDRCREAGVQAMVEGPGHVPLDQIPAVVRLQKRVCDGAPFYVLGPVPTDVAPGYDHIAAAIGGAIAAYHGADFLCYVTPAEHLALPDVKDVILGVIATRIAAHAADTARGMKYARRENEEMAEARWNLDWDRQFELAIDPKKPRHYREERPPQAKELCSMCGEYCAIKILKDALEERR

SEQ ID NO: 107 - protein, 452 aa, Methanopyrus kandleri
MIHPSRLFVKLSASPRVDGEIVACGTKYDPITEEEREIVETLNSMYMLLTRFEGYPLPAPQVISNELGEVAEELRREGFGLTKIEQFKYDDPEVALVSKIVLDETRYVYCTYRNENDLQSLAHECQCTVLECGGGEATVEAPSKFHALRFAVQVPLRLHGSAAIGLTQAAATERFAKAERHADSEFAAFSKIGAEWIIHRGGDPLPPPRRTNTAPDRILYLDIVGSSELVRERGRRYLEGIMSRVIDVINEEEGVVLDHRRGGDDVIARFPTKSRALRAAIKIVGRLTEDDVKIKIGIGDSRGRAAENAVTVRERVDYDCSYIAFRFGPYLVAYVEPPDYAVRIFGRIPSESVRAVGASAIVGSLTALHPYLALPFFVYFPIAAAHRNRDSASVAVVWFLIWVLVTLSAAWFGLYVREHYLPRPLVLEMNALFSQLMNLAKTMAARAGAGTP

SEQ ID NO: 108 - protein, 238 aa, Methanopyrus kandleri
VAKAERSDAGKDKVWIPDEEAKRIGADVSLQVLDALAKRDYPVYDLKKHAELDVRSVAREVVREIGGMAGLEFSLKGVDTVLDKFLSKIPVVKTVVAEEELEPVAEEDRYVCFIAVDPRNYRELREKAGAIAVTAREELDLDHTPLVLVRNDLCVGPEEFGVLALHSSEVAKERPPFKVEVLVGEDLKPTMIRLARFIASTVATRTVYLKFPYVVVKESLLVEKGDYKVRVKTPEEVE

SEQ ID NO: 109 - protein, 467 aa, Methanopyrus kandleri
LRVVMKFGGTSVGTGESIRKVAKIVTDAAEEHEVIVVVSAMSGVTDELVRAAESAPDWTEEDVKNFVGKLRRRHGKAASEAISSDLIRREVMGYVDSLLEELEKVLLGLSYVGEVTPRSMDLILSFGERMSAPIVAGALRDRGLEAEHLEGGEAGVITDDGFGEAEPILPACRRKAQKTLIPMIESGKIPVITGFIGRTIDGEVTTLGRGGSDYSAAIIGCISEADEVQIWTDVDGVMTANPNLVPDARTVPRLSYEEAMELASFGAEVLHPKTVIPARSENIPIRVKNTFNPESEGTLITSESEPSEQVVKAVASSSDVGMIDIRGTTMIGRPGVAGRIFSRLGDEGINVIMISQSASESNISIVVSRPEVRRAARIIEREFVGERVVERVTTYEDVAVVAVVGEGMRGTPGVASRVFRAVADAGVNIKTISQGASEVNISFVVAEEDEAAAVNAVHSEFELGEEA

SEQ ID NO: 110 - protein, 243 aa, Methanopyrus kandleri
MIRRLVERYLRHVTKKRLTRRPTTALIYTCLLGMKAIARAFSEETISSISPEPLWTVESVSLVRIGTYPGDVLCSELVSFLTREFEEEERVEDVLPEVEVEAEFLARVRRFNDLLYEDIELPFEIEGTGEEEPDLDLRLIEVLLALDEIPQSEQGRYAKPFILTCFETLSDYLDVLGLRWSDVDTVRRKVRIKGRVHRISRALAYELRRIPREGEEVFPISSVDVMRWERAVSKEVGRRLRFL

SEQ ID NO: 111 - protein, 711 aa, Methanopyrus kandleri
MYAPVRRGCSKLKLPEHVREYLDRKGIWELFPPQREAVEKGLFDDENLLIAAPTASGKTLLAEMRALHELIESHGETRVVYVVPFRALAREKYEELTNVIEFCREKGLEPTIEISTGDVRRPIRELRPGITVTTAEKLDASLRSRPSLVEEVDLLVLDEVHIVGDRNRGATYEALIALVRTFREKVSLLALSATVGNAEELADWLDATPVISDWRPVKLEHRIVEVPSASEKDAKVRKLIRKCLREGGQALVFLYSRRRAMTEAKNLSRTVSGLLSEDEKKELRTLAERVSELGEGEETEILAYAVMRGVAFHHAGLTAEQRALVEDAFREGLLKVVVSTPTLAAGVNLPARYVIIKDFGMRLGNEIKPTKNEFKQMAGRAGRPGYDDMGLVFVLTTSNWKELAEEYVHSEADPVQSRIWVSGPQLRRFLLGLVAAGFCRQIADVMRVALNTFMSSVNIRPEDAVLSSLKMLVDWGFLEELEGELTATKVGHAVSQSYLTPDSAKFLLRCMEEVGTEENVVLPSITLCPDFQPAPISSKSRELSTLDAFMGGSPSIEADEVLELAVEEFGYDDWELERRLAWAEALSDWVSGSPDRSILRKYDLYPGDLYRAKDDAAWIAWGMSRLARAAGITWRSPLLSRRLEYGVPKEALELTEVEGVGRTLAMRLYRAGYHSVRDLAEATVPELTRVRGIGEQLARKILESARRLTGT

SEQ ID NO: 112 - protein, 165 aa, Methanopyrus kandleri
LRRLKIEGRAYIHPTATVLGEVELGQDASLWPGAVVRGDLEPVRIGRESNIQDNAVVHVSKGYPVEIGDRVSVGHGAVVHGATIEEDCLIGMNATVMNGAVIRRGSIIGAGAVVTEGTEVGPYEIWVGVPAKRIGTTDEERVDEIRENARRYLKLAREELPEWRG

SEQ ID NO: 113 - protein, 345 aa, Methanopyrus kandleri
MGCECIGGNVVKALGLDVGGAHTDAALVRYDEDGKVMVLGTDRVYLPMWKKKKRLKKTIKRIVHKFKPDVVGLTMTGELADAFNTRREGVEYIVRTVTSACHAPVYVVTSDGSTVPPEEALRRWREVASANWRATAEVLAHVRPGSYLLVDLGSTTLDLIPIIRGEVAAEGRTDLERMKNGELAYLGALRTPISFLLREVEIDGEPVPVSYEYFSIVADALLLLGEIDPEDYTPETPDGRGKSPEECARRLARTVCSDPEELGWEGVMDLAKTAVRALLGQLLKHIELKLQEHGLDTVVAAGAGDFLIEMACKRIGVEVEPFDEIFGKGSEVAPAVGAAFLAIRR

SEQ ID NO: 114 - protein, 307 aa, Methanopyrus kandleri
MRVYIYEYAVATGDEEFLAEGRAMLESLLRAFAKSGYETLTVAHPSVGVRWADEVLRDETQALECADLTLVIAPESDGLLESKVREYSRETEVIGPTPRAIRVAADKRKTEDALRDARSFQLPTREADVMVSKPADGAGSEGVRIGRGELSRELIPGSHHSLLCVSDGETVDVLGINDQFVAFAGRELVYLGGRTPSDHRELTRIARDIAEEVVERIPGLVGLFGVDLVMKGGEPYLIEVNPRPTTPTVAAALEHPEAVVRSLLEGPTGKVLRYRREYVYVKRGAEALVPEKFEVVEDFHGLRVYRG

SEQ ID NO: 115 - protein, 377 aa, Methanopyrus kandleri
MTDIVYDVEGFRAFLPKETLRWIRHRELERKVGVVEKFSDRVGPIPVEIRRRRSQYGEFYHAGKGTTRIQARVSAAMECVERAAAEPREEIIERGPEGDKWTPAWYRTEPREWVEGVDLTTREPVYVPANEVFHPWLGDALPSHTNGLSAGRLREEAVIQGLLEVVERDSWSIVEYFRIHPPELEVHGELEELRRSLEREVGRVELRLLPSRVEGVYVVGAVTEAERVEEMVMGFGASPDPEMAVLRALLEVAQGLSMARRGIESPVRKGLGEFSAPGKLTPERLKRLNRHWFEPEGTVEIDDLDRVITTGSLEKLTEELVERVAEAGLGKVIEVDLTLENLDVPVVRVRVTGASEYVIDEARVGNMPEKPPGVPMG

SEQ ID NO: 116 - protein, 296 aa, Methanopyrus kandleri
VEINGVEIEDTFAEAFEAKMARVLITAASHKWAMIAVKEATGFGTSVIMCPAEAGIDCGYVPPEETPDGRPGVTIMIGHNDEDELKEQLLDRIGQCVMTAPTASAFDAMPEAEKEDEDRVGYKLSFFGDGYQEEDELDGRKVWKIPVVEGEFIVEDSFGITTGVAGGNFYIMAESQPAGLQAAEAAVDAIKGVEGAYAPFPGGIVASASKVGSKQYDFLPASTNDAYCPTVEDNELPEGVKCVYEIVINGLNEEAVKEAMRVGIEAACQQPGVVKISAGNFGGKLGQYEIHLHDLF

SEQ ID NO: 117 - protein, 290 aa, Methanopyrus kandleri
VSVSVSVDAETNVVGLIGHPVEHSLSPAMHNAAFKELGLNYVYLAFDVPPERLEGAVRGAADLGIVGLNVTIPHKEAVMELCDELDRDAELIGAVNTVRFSRGKIEGFNTDGEGFLRALREETYFDPRGTKSVILGAGGAARAVSFKLATEGADEIVIANRTVDRAERLAEELKEKVGVKARAIGLDGDEIERELRDADLLVDATPVGMYPNEDEPPLVTADQMHEDLIVNDLVYNPPRTRLLEEAEKAGATPVSGVGMLVYQGALAFELWTGEEAPVEVMREAVLEHLR

SEQ ID NO: 118 - protein, 272 aa, Methanopyrus kandleri
MLDVTRLPGDRLLISSDIHVGDEYQGHDRETWEAALDLARDFDAFLIDGDLADPRASDPELRELLRDLRELSSEVPTYFVPGNHDTVDLVKSLRDAGVHVLSRRYDNRRGRGCPPGHSGPSLGGPHLLRFGDAWMLVLHGHEPCSELGLNPQKPVNPVARESPMPKRDQILDNYTCREYEMPDRLEEIARSTHADVVITGHTHCRYLGSLEGKLVVNVGTTSCPAICATCRDPLNVGNVCILKASGGTLRAKLFNLRKARVIGRERVRIGRR

SEQ ID NO: 119 - protein, 164 aa, Methanopyrus kandleri
MEVPLLEVLLYTDGSVTRILERFFEEVTIDPLETRKLKVEGREARLLGVPDGDTVYVRRVVIKVDGRPAILATSLARPDNLPGRLRRLVLQSRKPLGKMIEELRLETRREILRVEEARPSPEDEEILDVSVPKIPWREYLVYHRRTPMLLIRERFNPEVLGREG

SEQ ID NO: 120 - protein, 316 aa, Methanopyrus kandleri
MMLSEDKLQKIKELENQLVKTREELDDLEEKRQEIQRKIDQLRSQIHEIRERAEKYRAKRDELNERVRELRERADEHRRRRDELNEEVQQYKAKRDELNERARELAQKAREHVETAKKLRSKVGRPIREIRAEIRRLEREIETNPLSPRREEQIAQRLEELREQLRAWEKANEHSKKADELFSQADELREKASEYHEKVVKTAEEADKYHQKMIECYERADKLREKADGYHRKYVEELAKVKPLEDELRELQSELRDLEQKIMEKRAEERALEVRIKDLEKQAVDEERLKEIKERLERGEKVSWEELQLLQEYGEM

SEQ ID NO: 121 - protein, 217 aa, Methanopyrus kandleri
MAQARRLVVLDFDGTLVDGETIDLIAEAAGVDDEVEEITRRAMRGELEFGEALRERVRLLAGTPASVLDEVVTELRLNPGVREFVAAVRSVGAAVAVISGGFTEVVSHFCRELGLDAYVANELEVRNGFLTGRVYGPVMSSSAKGRVLMELCRRFGTRPEDTVAVGDGANDASMLKRVGLPLGFRPKKPLYEIIEMAFDDFRRAVPVVLRFWGVPVE

SEQ ID NO: 122 - protein, 428 aa, Methanopyrus kandleri
VFGLEDVHSVVRAVEKHHEWLKKCLPMIASENVTSPAVREMLVTDFGHRYAEGKPGERLYEGCEYIDEVELACVRLAKELFGAEHANVQPTSGVVANLAALFALTEPGDTILGLRISHGGHISHHDISAPGVRGLNVEYLPFDEEDMAIDVDGMVRKIEEVEPSVVMLGASLFLFPHPVEEAVEAVEAVGGYVVYDAAHVLGLIAGGQFQDPIREGAHVVTGSTHKTFPGPQGGIVLCQRDLADDIDEAVFPGLVSNHHLHHVAALAVALAEFKEYGERYARDTVRNAKALAEALYAEGLRVLCEHRGFTESHQIAVDVREQGGGAVIAEKLESANILCNKNLLPWDDESKSHDPSGIRLGTQELTRLGMGLSEMEYIAELIADVVLGRREPSEVRKDVEELRREFQEVKYGFGSGVGAHEWPRLADW

SEQ ID NO: 123 - protein, 193 aa, Methanopyrus kandleri
LVEARALAEAVTKGVLTHVEVSVKPGSGLVLDVDVPRADRVKDIVRSLVTPITGMYQVRVRITNARAEPEAANKKCLATGTFTALGKALMDAFFPGRGTEAVNKALLRVPITSEEAYRGKRFDRVYDPRKKRWIPARPGMMCRTKDGMICAVTDDPDGIAPPAAAEKDAKLATVLCDTLFDMLLAEKPPTVRG

SEQ ID NO: 124 - protein, 177 aa, Methanopyrus kandleri
VRPESEGVRQAARLMAVAARTAPKTRGIDDIVIEIVEDEDTLEKIAERMEEIAEEKGADFFKRDAECLRRSECLVLIGVKSSGPCGLNCGMCGASCDDIEERSADVEFAGPICGFKLIDLGIALGSAAKVANDLVVDNRLMYTIGVAARSLGVVDADVVIGIPLSATGKNIYFDREG

SEQ ID NO: 125 - protein, 87 aa, Methanopyrus kandleri
MARNPRRKGRDGWKQSKSRGKPSFVTCECCGGKVPRHKAIPWTQGFRITDPVVRQAVDDRYVHTFSRKVYYCPKCARFLGIRKPKRR

SEQ ID NO: 126 - protein, 477 aa, Methanopyrus kandleri
LGGGSVGHVVADALRDRGEEVVIVDCNEDRAEVLREQGFDVIIGDITEKEVLLKAGIERAVMVYVLTPDDDANAEAIRLIREINEDTYVIARVTDEERVEEFKELGADEVLSPNQLLVEKLLHNIDNVRNRRKVHELLTKLEDVETLAIIPHNNPDPDSIASAVALQEIASIVDVQSDVVYGGEIGHQENKALVNLLDIEMKRISRVDLDEYDAIAVVDTPVLPRELAEYDGIEDRILVAVDHHDSSDGMMDMNGTSKSALELADFVDHRPEVGAASTILTQYLKILDRNVDRRIATALLYGIRTDTLNFTRNVSPEDLKAAAYLYPRADHEALAKIESPDISPETLDVLGEAIRNRTVIRSYLFSNVGFVKNEDALPQAADYLLNLEGVHTVIVFGVVNGKVKISARTDDIRLNIGEIMKEAFGDVGSAGGHSKAAAAEIPLGIFQDVESDMVLDLVEQAVRKRIFKVIGIEEEED

SEQ ID NO: 127 - protein, 617 aa, Methanopyrus kandleri
VNGLCGIVGYTGERDAAPIIVDSLVRLEYRGYDSAGVATIHEGRLYLEKDAGKLTEGGEPTKLQRSLRKLPGKIGIGHTRWATHGDPNRRNAHPHTDCRDEIAVVHNGIIENFMQLREELEDKGHRFDSETDTEVVPHLIEQGMKEGKSFFEAFVEAVRRLEGSYAIAAICTREPDVILAARKESPLVVGLGDDGNFLASDIPAILPETNRVIPIDDGEIVVVKRDEVRILDAETLEDVTEEKEVQIVEEDPHTLERRGYPHFMLKEIHEQPEAVRNTLRIERENLMEMAEELVGGDYTKLYIVACGTSYHAGLGAKYATELLAKFPVDVVIASEFRYVTKELVDENTLVLAISQSGETADTLAAVREANARGATTIALTNVVGSTITREVDHVMYTHAGFEKAVAATKTYTAQLAAMYTLAVELARHFGEITNKEAEEYHAELNKVPEMLEEVLSWEREREIAVMGGRYKERPNWFFIGRGPGYPTAMEGALKLKEITYQHAEAYPAGELKHGPLALIEEGVPVVAVAQPGGVYEKMLANIEEVKARGATVITVADEKDEAVEEHSDHVIRVPSISEVFSPIVYTVPLQLLAYYMSVARGIDPDYPRNLAKSVTVE

SEQ ID NO: 128 - protein, 351 aa, Methanopyrus kandleri
VIRLDVRERVVKLLCDYISIPSVSGEEEELSERYASDLERAGLEVEIDRLGNVIGRRGEPEVCLTSHLDTVPPDEMEKPFEPRIVDGKLYGRGACDAKANLAVYATLAEIWDGPLEIIAVVREETDSAGIRHVLRRGEIQANHVINGEPTELRPVIGHKSRVEVRLCIEGEPKHAGSHNPENPILKFCKILHDLHEMLEDLEDALGVPTANPTSVHSRGVATNVTPQCLEAVLDVRLNTQLSPEDLERFFHEVEGVSAEIRAGAPPFVLSGDEPVVRALREALSARGLPDEPITWPASTDAGYIRNLGGKDVVVFGPGSIDYAHSPSEHVPIEELVDAVRVLYDVVEYLSS

SEQ ID NO: 129 - protein, 640 aa, Methanopyrus kandleri
VREEDLDWEEIGLRVGLEIHRQLDTSRKLFCRCTPELVEEVPKEPKVRRKLRPVQSEMGEFDPAALEEFKRDRTFYYLADGSFSCLVELDEEPPHEPCSEALDVAIKVTLLLGGSVVDEVHVMRKMVIDGSNTTGFQRTMLVGFGGEVPTSEGPVRISTVCLEEDAARKVKGRDQDLEVDYCLDRLGIPLIEVSTEPDIRTPEQAREAAERIGEAIKAVGGVKSGIGTVRQDVNVSIEGGAVQEIKGVQDLNLIPKVVKYEALRQANLLRIRDELRERGVSETDLIDCEPMDVTDVFEDTDSEVIRRELERGGVVYALLLPGFEGILGWELCPGRRFGTELADYARRRGVSGLFHSDELPKYGISEEEVEAVRQRLGAEDGDGFVLIAGPEDRVKSAMEAVKDRAIMALKGVPAETRRARKDGTTEYMRPRPGAARMYPETDIPPVVIDEDRVKELAEELPEKPWERKERLAEEYGLGEELVEQMFEHGVVDEFEEIVEETGVEPKVAAATLVNTIPRLEKDGYPVDNLTIDHVKEVLRLYAEGAIAKSGIEELLGALAADPDSDPEELAEELGIVMASEEEIEEVVEEAIRRYEDKIRERGMAVMGKIMGEVMEVLRGRADGKRVSELVRERIREISGE

SEQ ID NO: 130 - protein, 131 aa, Methanopyrus kandleri
VLEVTLPGEGTPPAEGFRTLHSLKRDLERYFRGYPVDFDDVPVRINVSGKPREVLELVREIPYGTVVTYGDIAQKANTHPRVVGVSLARNRVPIIVACHRVVAADGLGGFRWGLEWKRRLLELEGALPSRR

SEQ ID NO: 131 - protein, 181 aa, Methanopyrus kandleri
VIVDREELEYDGSQLRRAFAHERYGIKGRAVVVFRGPMDVRTEYTADAEDVGSPIRGNDVLHLLVDDPTRADPLVAGLLQRLLVVVTKEVIEKELSTDLDRDGDDLLHDGRKLTVSVFKPAGPGSLAHLGINVTTEGVPVPASSLRDLGYRGDPLDLGRRVAVEFVREITDVELDLTKIRW

SEQ ID NO: 132 - protein, 492 aa, Methanopyrus kandleri
VVRDLNEAVVIRIETPERSERVKVPYREGMTLLDALRWIKEHEIPDLEFEFSCRNAQCGTCAVLVNGKARLACEYRLEPGQEVTVGPLRHLPVVKDLAVDWSAVTSRLRPLSPKSHREWFRRMEPEKQRKLYELRSCIECLCCVAECPVIKAGSARNPGPIVLRKVAEEAEKWDESPEIDDSVYACTTCHTCAEVCPKDIEIPAKAVETVRARLYEEGKGPLPEHKELGERAVRTGRSVEKRDRSFLEEYSGEYGEGDVKAMFFTGCLVDYRLPDTGKALVRLAEELGIRLIVPREQVCCGSPLLRTGQHDRAERLAFENLETFRRVDPDVIVTVCAGCGATLKNNYPELLGDRFEWDVLDVTELLVEIRAHERGFRLPERTTVTYHDPCHLKRGQGVEDEPRKLIRSIENVEFVEMEEPDRCCGAGGGVRSGLPELAELMSDVKAHMVRETGAEVLTTVCPFCEYNLREGLERNDVEARVENLTVLLSRGL

SEQ ID NO: 133 - protein, 338 aa, Methanopyrus kandleri
MSGDKDRRLPFDRDREMITKAEVETDPRYGCPPEERPIEEYIMKGVINLDKPAGPTSHEVVAWVKEIFGLSKAGHGGTLDPKVTGVLPIALEKATKIIQTLLPAGKEYVTIMHLHGDVDEEELERVVKEFEGTILQRPPLRSAVKRRVRPKKIYYIDILEIDGRDVLMRVGCQAGTYIRKLCHDIGEALGVGAHMAELRRTRTGPFSEENAVTLHDVKDAYEFWKEEGWEEPLRHVVRPMEEGLEHLPRIEIRDTAVDAICHGANLAAPGIVRVEKGIQPGDLVAIFTLKGEAVALGVAKATWKEMLHADRGIMVDTKRVLMEPGTYPKAWGLKTPGE

SEQ ID NO: 134 - protein, 2042 aa, Methanopyrus kandleri
MSSRLTLVIAFVLLIAVSPVHAGKLVIITGYWSTGMPAAKAASGLPVTVIVEDTVSKGFVPEEHVREAVESADTLLLIHTTSNTVFGNVLNELFSESSSEKRVFEFDNVLPGPSEVKSLDSVKVNWYGLEIPLSLYVQSRSVRNFRSLFSYFLERHPGPYHPFDGWVEGYDFERDEVIRPSDPNPGEVMTLIERYGDGGVILGNTRYPAWFVELLRKHLPDIIEEVLSKEPRREGPTVLVIVDTTRMESGWTAPIRELCKALRERGLNPMVLGLHYDILDGCLEDVLLALKRIVSEYNVQTIALLPGFFKMRSPDSPEVELLKELNLPVIKLVSLPWTMSEWQTCWRTPSGLDWFALYHIVIPENLGAIEGIPISVREWRKDGPEALLDRVWCSDTPVPEMIRIAADRILAWIELRNTPNREKRVVILYWAAEPGKEGVGTASSLDVPASIVNFLAWLMKASYRVEIPEELKEKLLEFADEIPAEARGLSIEEMLLRIAELEERAEELAQEGRWKEALDLYYKAYRLIRPLADALGRLMVEEGSNVGAYILRRVNVEGHRLVLRLLAYEHGRFVEREQEIRYLHLLPLDEYLKWYRSLPEEARLCMEKGIFGYLEAVLLQIQKHGPITDPLKLQAIVNGLKSLVSYVAGHLQYLDVPEETKEQFQRDVESLVDAVIGALTDPKEVNQALELCRSLHAKWGRVEAFYGWFTGWGPPERSRYLVEIDGKKYFVIRGIDFGNVIVAPQPARGYYVGISVAYHSTVLPPCHYYLACYYYFTRVFRAHVIVNTGKHGTYEWLPYKPLFMSWWDFPQICIQNVPQVYPYYVADPSEALVAKRRGWAVIVNYLPQSLVKEELTGDMGQLLELLERYQSSHLSSLKPAILDLVKKTRAYELLNLSSLEAFERKFDENCAKLYFLLHDLEEHEVVPIGLHVFGMPPIGEDPVGTVASFAAKVLLNEVMGALDYSRALDVCREVIERPETRDADDLHREAARIVELLFESARLERTNFLNALSGGYVPPGFNSSPFKQIDALPTGRNACMFDPRKWPDWISINVAYTVAIPLRTVTRKVVAFDWATDNINTRGLPIAVQMLLLGVLPHRNADWVVTGVDPSLCMNPSGVSYTRRLGQILVVGRIVRMESLGSGAVRLVLEPPMGGQRIEVRCPVNVLPIPLHLDDEVMVLGTLVSTGGRVEVVNARVLSEEEAKRIEDEVLTPTQLSAVGRAFGRLPIRGRVERVEGRYIVLTDGCTEVRVRIDEGRVPEEGETVTVIGTVTLVGDEPVISASLVLREVPRRLTDVIVTGTSCFRDVFAHNILTELFLGRVAAILAAEPYLARLLSHSSLIVSDVDKVLEIRGIDEYPVYWVRRWLRETVERLSQGEWKNPIHETVLHVYRAALWRALTTPDEELARELEEGLRRLYDLVGEFCAEHGYDFESVVNTAASLAVLVPPAENYPFLDWAAVYLALLTCRESNITSAPDAGSGGSPNGGIITGWIEQVREVPDEDLPLLAALNVFCQAPGDYTNVIGKTIESGEFLLEDRLNLALSWISGLSYVYGPKHWGASFPLLLALNLAAPDRTLHTMVSSDEKATFFYDDCIYAFEGGLRLAVSAVNGLLPEQETMIDALVLNLRNAALGSYVGGDYSQMARRLAEEIQLMAAANPNLAPWLRDLASQLSAGSYLAALLASNMTSLFSTVTTRTLAALTGNETAAFRYSLLMPFDTYAWYDLMRTVFNPVYVRGLRFHGYSGAVELLKRLGYLIRGWSTLALGLLGWEGIFRRTASTLVENREWLARYSPEGLFSLAVSLLVIAYDRAQHKLISEEVLKSREFVALVRDVIVPELLRGVLCCCPGVCGNPVVQQRLLEALSQYEGLVPNLREAMAVFAANYMNNPELVARILRQLTSPAFTRETAPMAARTVRTLAVRATASQAVAISATIAAILASQAALSGPGRGAVPVSVTGVLLRGTVGAKSAATVEVSVGSSAGKGKPSQERSARASILRRTSAQSPVTTSVPRWILVALIVALLAAVILVGTLWRPRIGTSRGW

SEQ ID NO: 135 - protein, 667 aa, Methanopyrus kandleri
VRQLLVILCCVTAIGPVSAATLEDADQCLKDSVVWLVENQFTEQDVGKTYTLRDPGGTYNGKQYEVHFATEQDGQLQDEGVASRDFTVEDVDVGTWPTTYKGDCRVIYVKKYNYFPSDYGLETVKLGDKIVALIDNSKCVIYVKKNDKYGYVGFGGEPGYSDTKFTVPMLVLAVEEGVTDEQFKNAVKRAIKWVLTVSSPRGYYYQYSLKDIRTTLEESGYIRTGSIGGVCLYQLIPLLVGRELGLVDDDLWNSVKDDAVYVIKNGILVPEVYCSSKQDKKDVLIVDSKNEIAYWVRQRLKDDTWVDYSAVYDTAGAVLTLIYAVKTGLISGDDDVDVGGSTYKVADIIKYAVNFLVERFYEGNGNPCFLEKQAVEQGLYWKSYYYPVKYAFYALWAIREAEKAGYLSDKAKDLLHDALRRYVCWLYGMQLEDKPGYFPYNEYIKGSPDFASTCAALLGLCTAVELGYEDDMAIQLMKNVVNALVSQYKEAKEKGLKYYFYVPTPQSYYYLYMSRFFEGREANQCAFATAHVVAALAAVEGLPESVRSEIFGHTVELKVEVPRETRVGTPVTIQIEVTIDGQPASSGEVRVYEGDRIIGVADVSDGKATITYTPEKRGEHRLKIEYRDPKYGVKSTTIVIKAKKKAPAVSPAVAALSVLALALRRRP

SEQ ID NO: 136 - protein, 126 aa, Methanopyrus kandleri
LSEVPEEFQKDVEEIKRRLREGELTNLGAALAVVLLASLKGQWINVDEIVRVLKELGYNVKANSIRSALYKVRQEGLLKSKRLGRKTAYFIPVDDDETLGAILRRVTGEEVREKIVEELLEEIHGD

SEQ ID NO: 137 - protein, 255 aa, Methanopyrus kandleri
VVAVAFPWSLFSEETDPKIYAYRVGTLARALAIYRVEEVYLYGDGVGTRRNAERLRKLLEYQECPQYLRKRVFRLDRDLRYAGVMPPLRAPHHKVHSPKEGEVREGYVVRRSRNGALVDVGADRLARTRWRFKPHERVTVRIVSEDPLEVEPAEPEEYWGYRVRIVNELNEVLREFKEGIIVTSRYGEDVREVEFKSPVKCLVFGSSEVSVLDVDPGVRDEYPVINFVPNQGVQVVRTEEAVHTTLAVLNYLGLI

SEQ ID NO: 138 - protein, 220 aa, Methanopyrus kandleri
LRVASGLEPQEGYEIGVVVDALRASSTIVTALALEAEAIVPLSSPEELKRVDGPTIGEQHGKKIDFADYGNSPTDLLRHAEEIEGETLYMVTTNGTDTILRAAEVHEEVLIGSLLNASAVASKLSGDTCFVEAGHRGMLAVEDTYTAGYIARLAGGEPADGRTRAAMEMARGLPAEEVFKGSRTGHVLEQRGRLEDVEFCARVDEFEVVPVYEDGMVVPQ

SEQ ID NO: 139 - protein, 249 aa, Methanopyrus kandleri
LLMDRFEMFGSELYVLRTAHAGVDGDRVRRKILELDPEAVLVELCEGRLLSFLAELRGERAGSRTGGITGRLVAVAERIVGRVVGGELGEDVKGAIEAALELEAEIVPVDMDISWVFRRMKMKASRWELLKFQFSVAIDVLRSLLRPGQTRDVVLSSVADEEAAREMVQGLRRAFPRIAEVLIDERNRVIAENTIEFLHSREDVTKAVLVIGAAHYGVLDILRDAELESASRHDDEDTASGEGEEETAG

SEQ ID NO: 140 - protein, 224 aa, Methanopyrus kandleri
MRVLFLGYRYGSRAAENVGSRSDFDVEFLKVKEPPENVILDEEYARTLLPPSYSGFDLVISYLQHPDLQLALAEVCDSPILYGITPDPAVREKIERSHDAVAFPETTMCSLLPDTGIPEVDRFAERFGRPKLEVSVSGGKIRTVRVVRGAPCGATWVAAERVEGMSVDEEAVNAFALAACHHCVAPRFGKFESKDVTAYLHGVALAEALGIELDVDLEGFELPI

SEQ ID NO: 141 - protein, 263 aa, Methanopyrus kandleri
LPGLTALAVLELLGTGFIAGYLGGIIGTGGCVLMLPMLVFLLKYPIPEAIATTVFAVVWTATFGTMSHAKLGNIDYETSAIVLAAGAIGALLGSVIFALIMKHTGALQVILGAAFLYAAVRMIYEWIKKIPGSEADEIPGKPSSKAAIGFGIGILTGILGLGGGYALVPSFIYLLDAPVHLAVGTSMISMIPMATVSAAYKMAQGLTDLVGGTLLGLGTIAGVKLGAKTTQKIKPWTIKGIFGVVFLYISLKFILQGLGIKLL

SEQ ID NO: 142 - protein, 158 aa, Methanopyrus kandleri
VPRKILVPFDGSEPAELALKWALLDAHDHGFPIKVMYVVDRSLDLLTGFAPRETVLKELKERGEKILEEAEQIAGELGVDVKIEKKVCVGIPWREIVREAEDDEEINLIVMGSHGRTGPEHAILGSVAENVIRHSPVNVLVVKREKRVEDSVEESSRR

SEQ ID NO: 143 - protein, 252 aa, Methanopyrus kandleri
MIPDPSMMLYLGIGGLVGLVSGMFGVGGGFLLVPLLNSTGMPMHLALGTTLLAISLGGFTGAYRHLQEGNVHVDAAPIFGLSAIVGAQVGSYLACLTPEHVLKVALGVACSAMALRMAFDGETEEGNEIRDNIAVASLTGFGVGAFSGFTGSGGGVLFVPVMASVLNFPTMLAIGTSSVIVPVSALAGAAQYWMEGYVNFWAALAVVTGMLISSYVGAELSNKIGGERVKRAFSVVLALVGAKMVLSGLRLV

SEQ ID NO: 144 - protein, 258 aa, Methanopyrus kandleri
LRSRRGFRALPPGPRPPRTPDDPARVIEDKIKECVRRSGHPRPGSRILVAMSGGKDSFAVAFGLKRLEVGTGGRVAPTVDGKKISAWDVVEEQAKILEIHAYLLEPESDVLELKEEMNARKVCYACRTLRRIELGQLAEEKGFDYIALGHTLDDAAATVILSLLTGAERLKLLWYTGTWRGGPRLIRPLVRCPEAVTKALAEELKVDTVMTEDVCPYAGGLRDEVEEFLDRLEREWIPHVKGNVVGTALRTLRGRQCH

SEQ ID NO: 145 - protein, 170 aa, Methanopyrus kandleri
VYVVGVDLAAKPGNPAGFAVWREGEIVCWSESSDDERVLEVCRKAELVVFDAPLTESDRPFRRRDEIFRRYAPVLPLTFPGMRELSRRARSLVRRLELEVYETYPRAAERFIRLHGNPVDEHSRDAAICCAVGLAVLEGEAHVFGEPPKAALPKRELSVSVRALTAPPDV

SEQ ID NO: 146 - protein, 855 aa, Methanopyrus kandleri
MPDKAEVFFDEGVLDFADVDEIVLDVGEEALAEALAHRHRRMIVFQGDEGKAEAAGVVTAGAADVLFDVRDRPISVLYVTDSLKEDTYARERYEEFRRVLEGFAEEANFEYELEALTFSGSKRALGTTWDLMVIDLSYDLDPDAIGRLVETVRGGGLVIFQTPPFDRWRNMWTAFHKSLVTPPYTLDHVGKRFNRRFIRKLKEHDGVWIVDTDEWTAEPEPSEDVDLEVEVKRRERPDLDPPDDAVLPEELYRMCATEDQFRALIRFEELLESNGKTALILTADRGRGKSALLGIAVAGAGVTTDVYDVVVTASEPENVAVLFEFLLEALRELGVEYDVERDDKGNIVYVETDDFVVEYERPSEASEIECDLMVVDEAASIHVPILERILDNNDKVVYSSTIHGYEGAGRGFSVRFLQNVRKRRDVRLIEFKMHEPIRYDSDDPIERWLFDTLLLDAEPADLDKEDLECVKEMRVEFEKPDLRYWFEDPEGEEELRQFIGIYVMAHYRNRPSDVMVLADAPHHEAYALKTETGKIVTALQVAREGTIPRDVITKMRRGYRPPGNVIPDLMVQHHDALDFPRMKGLRIVRIATHPDIMRHGLGSRALKELAKIAKKKDYDWIGTGFGANEELTRFWLRNGFVPVHISPNRNPVSGEYSVAVIRPISEEAEEIINRANFEFRIKLADWLGETHRDLEPEVARLLFEPMSSLRYRPTLTEGQLRRLKKYADMVHTYEIAADAVRELAKAYFLDTEDRPELSEEEELLLITKCLQRWKWADVADVLGEEVPDLMRSLRDLVGLLYEEYKEDLQRSAAVEGIRKAVERLADKGLTGTVIVEVEEGEPKEVIIRREERLEL

SEQ ID NO: 147 - protein, 236 aa, Methanopyrus kandleri
LTRLLGGPGLTPRIMVGTSPFLGAGQFGHRALLYRRTFYHRPENIVALLEYCAEELGVTGVQALADPVIIGALRDADPDLDVVAVVGLRNLEEELEMLENLNLRAVLLHASCVDGEDVGEVSAKLDEIRSRLDVPVGIATHRPDETLPRWEDKKTADVYMVPLNPVGAFMGDQKAVEELLAETDRTVIAKKVLAAGSLPPEEGLPYAARYADAVAVGITGKKEAEETLRIAKRYFG

SEQ ID NO: 148 - protein, 459 aa, Methanopyrus kandleri
VPVVHVGLFGHIDHGKTALAAQLTEKPSTAALDKHPEEKERGITIDLGFSSFELGDYTVTLVDAPGHADLIRTVVAGAEIIDAAILVVAADEGPQVQTGEHLVVLNHLGIDRGVIALNKVDLVDEKTVERRIEEIKRVLQGTTLEDAPIIPVSAKIGEGIEDLKDALLEVLEPPNRDLDSPFRMPIDHAFHVKGAGTVVTGTVLTGRVEVGDELTLYPIGKTVEVKSIQSFGKDKQEACAGDRVGIALRGIREEEIERGFQLAEEGSLRVTRYLDLKVEIDPLFPQSIGQKTMLHIHVGMRSVPARIVPHDDGFLLDSLRPGESSYLYAKLNEPVAVREGDRTILVKLDLPPTTLRIAGSGLVEDTSKRETFKRVSRRRGRVTRADHMGKGLAVVDGLALNKEHAERLVGEKVRTEGGVEGKIVDTHGTRGAVLVDFEGEVKTGERVVLERVRDVKIDL

SEQ ID NO: 149 - protein, 216 aa, Methanopyrus kandleri
LNPATAELWTYLLVLAFSYGTAYLIVACEGPRYLLASGVVLLFINVLLWIHIFDTKARNGSPPTGAEIVRVRRALKLSFAILGLQFTGIASIPGLLMAFTALRRKVFYFMGITEFKALVYGTLIALVTLPCVIALRKRHYHWVLMGMPIDTVVSVRNTFRRVCAIDAVLPIPIVVAYVLLAKGGLGGEDIFTAAAVAGASSLFNRAKVRYFFDEGW

SEQ ID NO: 150 - protein, 273 aa, Methanopyrus kandleri
VAKYEHMMECLGKTPVRVIWKDGDVEVRAEGDPMIERCPLMRRREGFSKLTREAAERHVLNKVNEVGMFTPKRRIRSCRRYTPFGVSETLMTCLQHRLIDAAVIVSDCAGTVVTDKPAIVQGLCGEISGIRDTDPIPEVVDRLEDSGCSVLGRIDQREGVEIALEEGRRFVAVTVADAGDAEAIREEFGDDVLIAAVHTTGTDEEDAERLVQYCDIITGCASKAVRRAAGRRYILKVGSRVPVYGITPAGAEALWLNVRELLGNLKLEVRHLG

SEQ ID NO: 151 - protein, 173 aa, Methanopyrus kandleri
VSSPDTPSCAHTSPPRHPPGDDVPLRLTPIGWVVERTDEEGLVKVRERYRKCLEGLEGFSHVWILWWGHEADRTVTRVRPVHGEVPELVGVFACRSPDRPNPVLLTLCRILEVRPNSGELRVSGLDARAGSPVVDMKPYLPGYDEPDGEVSVPEWVEMVKRGHRPPRTRGHRR

SEQ ID NO: 152 - protein, 571 aa, Methanopyrus kandleri
LTEDVYERIMEIARRRGFILPAFRIYGGARGFYDYGPLGALLKRKIEEKWREYYVHKEGFMEIEAPNLLIGEVFEASGHVEHFIDPMTHCSECGEFFRADHLAEEELGVDAEGMSPEELEDLIREHDLRCPECGGELAEVTEFNLMFDTNIGPKEGRTGYLRPETAQAIFIQFKDLYRWARQKLPFGVVQIGRAYRNEISPRQGVIRLREFTQAEAEVFFDPEEKEYPGFERYADEVLKFYPIEEQRKENGEMLEMSVREAVEEGMVSQPIGYFLGLTKRMLNEMGVPNEAIRSRQHLPEERAHYASDCWDVEVKLERFGWVEVVGIADRTDYDLKKHSEHSGEDLRAFRELEEPKIVYRPEPVMKELGPRFKSDAPKIAEALRRITAESEDELKGGLTVEVDGKEVEVPPECYEIVKEKVTGERFYPHVIEPSYGIDRILYCVLEHNFDPEEGVFRFPAWLAPIEVGVFPLLKRSDMVEYARRVARMLREEGFTVEYDDSGSIGRRYARADEIGVPYCVTVDHETLEDDTVTIRDRDTTEQVRVEVDELADVLRGLIDGDLEFEEAGDPV

SEQ ID NO: 153 - protein, 326 aa, Methanopyrus kandleri
MLTQVALDLTSLPKAIEIAEASVEAGIHVLEVGTPLIKAEGSRAIERLAEEFPERPIVADTKTMDVGALEAELSIKHGANLGCVLGAAPEETIRSFVTRAHELCAGALVDTIGVNPVDVLSKLKGLEEFPDYLLLHAAIDEPITGEELLHKFGVDRCPARTAVAGGLTPRKIEELDGVDLVIVGGYITSSEDPVKAAEAVVEAAGVEPYDFRPDEDQREALLGIRKHSTVGIVVKDSERVSEVLNAAIRLVEWVRNEPSLRTVGDDDSDLVPKFEGDGRDLTLILGAEEFDREDLESIAKESVKTILVAEEHVLKLYGVAEAVYEI

SEQ ID NO: 154 - protein, 383 aa, Methanopyrus kandleri
MELEIITEGRTPLKVPKTRGQPSARDPVFYNPAMQLSRDLTVSSLVQYGPKIVCDPLAGVGARGIRIAVELSPEVVVLNDLNPRAVELIEENVRLNDVEDVCRIENRDANALMHEDELAGRFDYVDIDPFGPPVPFLDAAVRTVRNRGVVGISATDVSALAGRYPRSARRKYWVEVERVEFYQEVAIRALISYIVRTCAKYDLAFEPHIAFFQRHHVRVIGEIRRGARRADRALKRLGYLLHCRECGYTSEREFDRECPRCGSGSVVRLGPLWLPDFADRERAERAASDARELGLEEAAELLETVAKETGTNPWAYDIHRWASRLGLSRVPSLTSVLEGLREEGFNAVRPHYSKRAVVKTDASPEEFEAVLTEVAGDSGCLHR

SEQ ID NO: 155 - protein, 90 aa, Methanopyrus kandleri
VSEVKRGVIVNYRMGRHTQDPRQCIIEFEGVESRSEAAQLIGKEVIWKHPETGKVIRGKVVDTHGNNGAVRVRFERGLPGQALGTEVTLK

SEQ ID NO: 156 - protein, 394 aa, Methanopyrus kandleri
LSKLAIEGGRPIREDPIPIAQPILGDEEARAVTEVLRSGQLAQGPRVEEFEREFAQFVGCEHCVATSSGTTALQLALESAGLGPGDLAIVPSFTFIATANAALHVGADVAFVDIDLETYCMDPRSLEEVVKLLKDRVLRPRTVAVIPVHLYGHPADMDPILEIAEEHDLIVIEDAAQAHGAEYKGRRIGSLGDAACFSFYPTKNMTTGEGGAITTDDGELAERARMLRSHGERERYDHVELGYNFRMTDIAAAIGIVQLRRLEEFNERRRENARYYLKELADLEPLIELPTEKPWAKHVYHQFTIRINVEELSCTRDEFAEALRAEGVDCAVHYPTPLHRQPVYLRRGYHATELPKSERAAETVLSIPVHPGLSEEDRQDVVEAVEKVVSAFSR

SEQ ID NO: 157 - protein, 752 aa, Methanopyrus kandleri
LPREKCPKCDGKGKIPVGETECPRCGGTGFVGDVDISEHFKGAAQHAVEGYDLASSRDVPCPKCQGKGVITVYEECDRCGGTGYIVKCRECGKELDPDVEEDLCEECRKKIKQIRKEKLPKVKVLSPACGYEDVEEGELYKGKVSRVEKYGVFIELNDRTLGLLHRRDMGDKEPQDFSIGDEVVVKVTDVRPEDGEIDFTIEGIDPRPDRYREEVVEKELKRVLVHDIDESKIGETVLIKGKIIHVQQTPGPTVFTLRDESGSIWMAAFEGPGIRAYPDIEAGDYVRVIGEVTTHDGQLQVEILDMEKLVGTEKVEIKRAIDEALDREAEPPEDLKPMVDSEIIERLWPRMREVAKEIKRAVLEGRPVLIRHHADADGISGGVALEEAILPILRENNPDPEAEYHFYKRFPNKAPIYTLEDASRDLNHALEDVHRYGHQVPLLVLLDIGCTEEDVPAIEEMKAYGVDVLVIDHHYPGEAVGENPEDGLKEFPIDEHVKVHVNPYAAGGDGKNIPAGVLAVEIARLINPEVEDRIKHLPAVACLGDHAESPEAEQYLEIAEEAGFDRKWLRKIADSVDFQAFQLRHTPGRHLMNDVLGTTGDEHRHRRLVENLYKQHKIACERQLEAALKGVKEYETDGVKVVTLDVEKHARKFEYPGPGKTCGLVHDLKVEEEGDDAKVVTIAYGPDFAVIRATENLGINLNDIVSELEEEMPEAAVEGGGHETAGSISFVEAHRNKVLKALVEKILRDATS

SEQ ID NO: 158 - protein, 162 aa, Methanopyrus kandleri
VRLRYLIPGILLLAPSTTYLGYLAAKEVAYFMYHESVSIPDCELVIPKLGLRERINTTSPDYGVYYEIMTPPPGKKGITVFYGHRTLFGSPFLHLDELKRGDKVIVYWFGSKYVYVVYDKVVVSPDYVIDPDASNKDELWLVTCTPLSTARERLIVKCVRVG

SEQ ID NO: 159 - protein, 275 aa, Methanopyrus kandleri
LKLSLKSTILVMLGMCVAYSALVGSITIAQTGQSPGAPVGQPTEPTGQGKKPPVTISKLVIEVQATGKGAQKPRESDIGISGAKVEDVKISGSRAYAKIVASNVSLEEGFPLMVNAGWPFNMSECSYERISVSMELKANVNSAPETELSGVVVLADGRLVDADPKPARVNDNVPVWKIGVKDGRVTIDGRPYGPFPEIRYVMEYSRGAGGPGAGAEGGGAGGAAGGAGVGGAGGAGAGGAVTAGQYKAGESLFLIAAVVLAAVVGLYLVYRGLSK

SEQ ID NO: 160 - protein, 348 aa, Methanopyrus kandleri
VIGAIVIGLIFLAAGGGAYYFFVYKPYVEQLEKLRAQKLKELNTYFTGPLAASPTRTKLQQQILSAETPEQLQAIDVVGAATVEWRRYLAKQIKMNQKKGRVELVTPEGPQLLTVRDALNKIRMMGVDELMKVQVKRPETVLIAIWADPNKTGPIKVGDRVTLSITNWALKKIAKVKNKEAYKGPNQISGAIVRYIMLIKGGLPDNFKIDLVSASALETMYRTGSSDLALRKVVFPAGLVTGRSYAVGGGTGVTYTLKNYPGLNTRVTSPHLSPVALVDLRDLVKAMAVERARRGGGFIRQLMSIEAREGIRSWENLLVIVEIPKDAVQPKVLIASSVKGGIWILPET

SEQ ID NO: 161 - protein, 243 aa, Methanopyrus kandleri
VERWKISELITPACVVSLTNVVFGAFSLLASIAGFPGAAARFIILSFIADSLDGFVARRTGKESEFGMNLDSLADLVSFAVAPAVLVVTAGLVPAPMCYLLAVLMVCCGALRLARFNAMCVDGYDPGEYYLGLPVPWVGTIASSLYFLTVDLGPSYLWYVLNTVILGTSALLMISSIKFPSLKRPHPAILAAGGLSSLVLLFSFLIPPDEIKRGLEVVASVTITALLSWYMVRGVRGCFRGRR

SEQ ID NO: 162 - protein, 214 aa, Methanopyrus kandleri
LMAPGWWKFVTPPAALGAALFPWSRPLSFLCLGTAAFLAFFFRNPPREPPSDPSLAVSPADGRLLGYVMEAGEASDDELSSYLDDPITVSVFMSPLDVHVNRAPLDGRVVEAEILKGRFRPAFRKDSATENNRAVLLFDGDPPFVVRLVSGAVARRIDLYVQEGDEVNKGEPIGMIRFGSRVDLAVPRSSVEELLVRKGDSVKAGETPVIRVKR

SEQ ID NO: 163 - protein, 182 aa, Methanopyrus kandleri
MSVWAFVRKALREPLRVGAPAPTRRETAEFMVRAAGVEEGDFVVDAGTGNGVVAIAAAEMGCEVLAVDVDPEMIDMARRNAEEYGVEDSIEFVVADARELPELVDNVDAVLSTVPVKTVPEPLEFLRSCATVLKTSGRFVQLTHWPGYFTKLLHHEVPLRVLEKYLKWVHIVPGFVFVCERV

SEQ ID NO: 164 - protein, 208 aa, Methanopyrus kandleri
VGVREVLRRLAAALRSGPEELDIGIYGAPNVGKTTLANRIAQDWEAEEFGQVSEVPHETRESVRREVAIEVGSTTVKFNIVDTPGIATKVDYRKFLEYGLDVQEAKQRAKEATRGVVEAIKLLKDIDGALVVIDSTKDPLSQVNVTLIGNLEANDVPFLVVANKIDLEEADPEAVRKAFSEYPVVAVSAKTGENMAKLYEAMVREFTS

SEQ ID NO: 165 - protein, 120 aa, Methanopyrus kandleri
LTDGEVKVEVLAKSALERMSTEEVVEYVIEKTRGGSVIVLEGQLDPETLTQIIRETMENVDLEEFTGVDIYVVPPKAKTDKGLFDRLLGRQSEEGMTVISPADVLKDMKKGKDFITLKLG

SEQ ID NO: 166 - protein, 84 aa, Methanopyrus kandleri
MPHICIRCGEVYDKVTKELIRRGCLKCGCRLFKRVSEDDGDNPATIVVERDGVYTINIENIDDVVTVYKSGRFFIVLPEQKYGD

SEQ ID NO: 167 - protein, 206 aa, Methanopyrus kandleri
LKTTERPELRVKILRAAAVSHEDISKEMDSYCAILGDPESIDDIVYEVMRLSNFEIIDNSIVKTRHGIVVWRYGVVLIKSTPEITSLIKRIVSDTNLMSVVFKAKDGNFLIAGPDIVLKKILSSARVKMKVKVTKRTRGIAFVETSTVVFDAMPGFLKDIINTLLGIEEEVFSILVLDVEDPEKFKKIIDKGPNVYWRRIEEDKET

SEQ ID NO: 168 - protein, 393 aa, Methanopyrus kandleri
LPLWKRKKKEETKQEKKIEEEKKENNEKKASKLPTSIQEALSEEPEIEIDEGLEALGIDLGTMNTVVARPAEEEFLVKQFPSVVAVKKGTNRVLAIGEEARRMLGRTPEDIVAVRPMRHGVIESLEYAKFIVQYAIELGSDNSPEEIERVAVGVPGDASEVEREAIEEATSDVGMDKDNVIVINEALAAAIGAGLPIAEPDGTMVIDIGAGSTDIAVISLGGITDQETMRVGGDNIDQNIVDLVEEEFGVRIGIHEAERAKVEVGKVFTETEDIEDKEIEVVGKDIETNKPKEITIDSELVAKAAEPVVQEIIRAIESILDRLPPELVPGVYENTVLVGGTSLMRGLRARIEEETDVPAELVDDPLTVVAKGAAIVAAEPKTLEPEIRLKALK

SEQ ID NO: 169 - protein, 236 aa, Methanopyrus kandleri
LRLRADLHTHTVYSDGHGTPLENVLAAEERGLETVALTDHGPASPDGLTDRSFRRLVAEAREAEKLCSVRVYVGVEANIVSISGEIDATPAMLSESDIVLAAIHNPRLILANPGSAEELRRAIVHATIRCIESGEVHIIAHPVWILEQLRCYITAQEAEEIARVAADHNVGLELNARHLPRDFTLYQVAIRVGAPITFGSDAHAPEEVGRFKPLQKLARRLGIEPQDVHPEELGIV

SEQ ID NO: 170 - protein, 349 aa, Methanopyrus kandleri
LNPPELAAALPYSGCDNPREFLKRLEVRSDPISLALVEIHGRVARKVQEWKPFVCPDIRAAREFTREIVAKAKADFLAERAGGSEALDLCAGPGGDTLALAEHYDVKAVDREVPRIEALKINARLHAGHAVEVIELDVMEAELDADVVHADPGRSGAKDPKRTEPPATELRDMFSEVPHMIEVPPAVKPRPGTVVFSATGEVRSVCWTNLTEKVAAVIAETSAVLEGLPRKPTEALEPEEVRYVIEQDPAVRKANLSWKLAEELNVHPTVVAGEETVLASEDPPDLTVDHVIRVVEVGEEGDGPPTIRSLGVKLNPRRLAELRKTYKEYDIVYVTKAGVLAGKVIYERE

SEQ ID NO: 171 - protein, 318 aa, Methanopyrus kandleri
LLEAAGAVLLGSAALLMVGRLGNRGFFLWLRTVGILGLLVGILSLALAALTGSAIAGLVVGVITAAMMYLFSSRIVRIQMGAVDAEEFLRYKPEYADKLRRVQEMVSKLASKAGLPEPELVVVPEETGVGGYPNAFATGRRSKPTVGVTEGLLRHLDDDEIYGVLGHELAHVKNRDTLVMTVAAAVSTAIAYAFDPWLNAMYTEDWEDIAFLVLAGMLASLISTLLVAAISRSREYLADEEGAKLSGNPMALAEALEKIEAIVKSNPAPARSLSEVSTAHLWIENPFRGGLLRLFSTHPPVEKRVERLRRLARELQGP

SEQ ID NO: 172 - protein, 214 aa, Methanopyrus kandleri
VLRVLLIYPRSLRYFVIRAYRELPSTVKPDSPVLLASCDAVRATYTRLEGNVVTVEIGAARNFQEVKASLAHELAHVLQFEHGVMPIGGLPPLRALALPLEVGAEELVLQELPDVAVRRLEMGLRRVTGCRTDDPLSELERSLVLEPLRLAAERLDVPLYVPEVEPEHPEVAKVKKRLLRRVRRIDPWSPLEVQRYLEDAWAEVTVLATLSRGA

SEQ ID NO: 173 - protein, 272 aa, Methanopyrus kandleri
MALAKRIIPCLDVKDGRVVKGVRFRGLRDAGDPAELAHHYYRHGADEIVFLDISASPEGRRLMVDVVRRTAEKVFIPMTVGGGISDVEDFRRALTAGADKVSVNTAAVENPELISEAADIFGSQCVVVAIDAKREPLKPEHEHVADHIFSNDDGEYWFRVYVRGGREPVDLDAITWAKRVEELGAGEILLTSIDADGTQEGYDIELTREVCNAVSIPVIASGGCGHPKHMVEVFKEADADAALAASIFHYGKFTIEEVKEHLAERGVRVRQC

SEQ ID NO: 174 - protein, 227 aa, Methanopyrus kandleri
LDSIEKYLLVTRRMVNAGIPKDRALNTVQRTWGLTNREKKALYRIVWSRLESLLRAGKRVPTPLLRGQDLVIDGYNVLVGLASLDAGEAVLCDDDVVRDLRMSPKLEEEEVQTALEMLETYLRRVEPRSVRILFDAPVSGSGELAARVERYLKDSLNVPVRASAVKGVDEKLVRAQGVPVTSDSGIIDRVSAYHDAVREVAAAEGIAVWIPPGPSEPKFVRALVPEG

SEQ ID NO: 175 - protein, 158 aa, Methanopyrus kandleri
MVRRTSEEISERMEDYLEALYLLSRRGSGRHVRISELSEYLEVSKPTALEMIRKLADRGLVEYERGLVKLTEKGREIGKEVWDRHREIASFLRFLGVDPKIAERDACAIEHSLHPQSFRRLRKLFHLLKEATGEPTVREILDKVRGEEGDSDGVRHRS

SEQ ID NO: 176 - protein, 159 aa, Methanopyrus kandleri
VKSWYGEVLETVDDAENFFERELRRMHKVELEEVPKVVFCAFDVIEGVKHEFEPEKYLYKPGAIPAGAQALTLDIMTDDHREDAVYIGEPGPEVSRDRWAGRVVSVLARLLPECVEVGLLEDVRELEGVRVRIGKFTLLNYVTGAALALSGAEVELEVQ

SEQ ID NO: 177 - protein, 89 aa, Methanopyrus kandleri
LDALLKICILNALAVVAFAVLVWAAFRYALPSWFILAIIVPGVLGSACVDYVMISVGVYDGPWETAFASVVYAVAWWTGRPGPSGPGSR

SEQ ID NO: 178 - protein, 434 aa, Methanopyrus kandleri
VAEIKIHPLTRVEGHGEVIIEVEDGEVTDVKFAVLAVRGFEKFVQGRPAEDVPYIVSRICGICQTAHHLAACKAVDACFDAEPPEGGHKIRWLMHIGNMIHSHALHFYFLAAPDYVVGPDADPLQRNVVKIVKDDPEVGKIAIELRRYGQDIVEATGGKAIHPVTGIPGGVSSPVDPESRDDLLNRAEEMIEMAYEGAKVGIEAIKETLEEYREKHDIDLLETLGNIETYHMGLVSDGDKHEFYDGEVKVVDPNGEEVTRFEPQEYQDVIAERTIEYSYVKHPYLKDVGYPDGIYRVGPGARLNVCSEMKTERAQELYEEYVDEFGECVNYSLTINWARLVELVAACEEAKMLLEDDVITEEDECKEDYEPKAGEGVGIVEAPRGTLIHHYVTDDEGRVKEANLIVATTHNVPAIELALKETAKKLEDEIVELA

SEQ ID NO: 179 - protein, 305 aa, Methanopyrus kandleri
MGKATIATAQLSSCVGCHVSLLDLHEKLLDLLEDAIEIEYCYVLVDQKEIPEHVNVAVIEGSIRNEEDLEVAEELREAADIVVAVGTCACYGGVHGLANLYQLDDILEWVFKETPTTDDEGETPEEVVPELFGYVRPLPEVIDVDYMLPGCPPKPESIAEVITAILEDREPELPTTNLCEECPREKEDIPIEEIKFRTGQGRPDPDKCLLEQGYPCMGPATVAGCGAACPSRGLSCRGCNGPTKQALDQGAAFLDAIASVSFETDVDVEEILEGLVDLPGKLYMFSMAASLLKGHRDVIFGSKGE

SEQ ID NO: 180 - protein, 190 aa, Methanopyrus kandleri
LIPLWWCAVFYAMAAIPVGLGALRIRSEGRKTILVGLLAGLSFVFMQVPIGHAHVNLTGPIGILLGPWSSAVAVFIVNLACALMGHGGITIVGLNTLINWGEAAGVWALYRLLRERLDYGAAAGIATFSVLATSSVIPSFVMAWVINKPVLPFLLTLTTVWIVTAIIEAVITASMVKALAQMKPDWVRDL

SEQ ID NO: 181 - protein, 230 aa, Methanopyrus kandleri
VRFTEALEWSLTAETVLHRIHPWSKLVGLMTTIFASMLLYDPESIAILSIPYLIGCILARVPVRILARLSIPPMAFLGAVLLLMLPSGVPGREVLLYAVRGATDLLAVLVTTLTTPFNALWSALVVVFPPTLAETGLIFHRSVYRAFEELEGTLNAIRIRGWRLRSINVLGSVIATLLIRSHRSAELVQVSVEVRGATGRVRPLKRFEFTRIDFGWLTMVFCSVALSGVV

SEQ ID NO: 182 - protein, 268 aa, Methanopyrus kandleri
LTHEYPDGTCAVCGLSLRVKEGESVVVLGPNGSGKTTLLHHILGLLTPTKGHIRVLGHDLPDGVREVRKRIGVVFQDVDDQLIMPTVLEDVAFGLVNRGMPREEAFERAREILERLGIEDLEDRPPQFLSGGQKRLVALAGAVAPEPDLLILDEPTSGLDFRATRLFVRLIRELKEELGFTMILTTFDVDIAAALAERVVVIREGKTVAEGSPEDILTDVDLIRESGLKPPEHVELLRRLGIENPPLDISEAEELLVAMLGEESRGNP

SEQ ID NO: 183 - protein, 224 aa, Methanopyrus kandleri
VETRKLRHPEVDLEGEVVLLPVGSTEQHGLHLPLGTDHLIAEALCREVSKRTGAPWYPAIPYGVSRHHMGFPGTVSLRTKTMVALLTDVHRSFLHHGAAATLAVNGHGGNEAALGTVAEEEERFHWISWWKLAPIDELETDWGGHADELETSVMLYLHPELVGEERKVDGRPTKPWEFPDYHEISETGTKGDPRPATADKGKRIFKTVVERLVDIVEELREMYG

SEQ ID NO: 184 - protein, 55 aa, Methanopyrus kandleri
VIWPDLTLGTARITGTTSGTHNVRAVRDRLWAGLMLCTNRRPVIALAYVEALKVL

SEQ ID NO: 185 - protein, 74 aa, Methanopyrus kandleri
MIRSLRTLKRAVVVNPLNPQSLRVLAVEVASDVVTAMAFSVRFSLLWIQCAPHGRDDAVEGAAGYGESLKGRYW

SEQ ID NO: 186 - protein, 210 aa, Methanopyrus kandleri
MSGVMGIDEAGRGPVFGPMVVAGVLAPKRELGLGARDSKELTRSARRRLIRALMSDERLRVDLRIVWPWEIDEEGVAKAEFEAIRELVRRAMPDEVILDKPGNYSPERLRRELDLPEGINLIAEERADAKYEVVSAASIVAKTYRDWIVRLLELEYGEVGSGYPSDPRTVDRLRRELRRGGELLKYFRRSWETYKRVESEVKQRKLEDFF

SEQ ID NO: 187 - protein, 219 aa, Methanopyrus kandleri
LRIAGLRPVSCSDGLPGEVCAVLWTQGCPLRCPWCHNPETRDPNGGKKADVETILRDVEKYAVYLDALIVSGGEPLLQPCEELKALARGARGLGLKVVLDTSGFPPDRLGKVISSFDRVALDLKAPLRDDEYMEATGGGMTASDFLKAARIARRRCDLELRITVHPWLDDVPRVVEAVRKASPDVVVVQRYVGDKEVGIDPEELAEKLRESCENVVVRV

SEQ ID NO: 188 - protein, 459 aa, Methanopyrus kandleri
LNVAFEVKDRDVAGRLGRLEVNGRRLKTPALLPVVNPNKPTLDPREISKLGFDGVITNAYIIRKHEHLREQALEEGVHGLLGFDGFVMTDSGSFQLAEYGDVEVSNEEIVRFQAKIGSDVGTILDVPTPPDAPRSRVERDLETTLKRAREAVELDEHPPLALTVQGSTYEDLRRLCAEKLAELPAAVYPVGGVVPLLEEYRFVDVVRVVLAAKSSLPPHRPVHLFGCGHPLAIPLAVAMGCDLFDSASYAIYARSDRYMSILGTLKLEELETFPCSCPACTRHDPDDVREMEPRERTRVLATHNLYELRRVIETTRQAIVSGELWELAESVCRAHPRAWAGMVELARRGGELERWCPAVKRSVFVCDEVSKGRPELRLYRRRLRDRFGELSGRKVVKGISRPYAEIVEWLEPWELAFADEWLGVVPGELSWSYPCHCLVEPSGDDEGEDRRRGEEGRRR

SEQ ID NO: 189 - protein, 293 aa, Methanopyrus kandleri
VRTDGGVKRVAGAEFVLYKEGGSEFYVPDPERYSQDGLPTRDAPVAFAPNAAVNRSVLVLFHRVRPVRRFGDVFCGVGARAIRLHIEAEVEWSVLSDVNPIACQIAMINVRRLGLPSEVRCMDAVAALSTFDFDAVDLDVFGTPIPFAQAAFRCVRDGYVHVTATDLESLYTPAARRKYLLEGPLPRRDTDLEVRAVVGALARLAASVDIGIEPMYCLVEPGVRIRVGLECRRGRSRANETLDMLDYVDGVGPVWGGDLHDEDVVEEMLEELDCTGWSEKHARDVRKSLEVTF

SEQ ID NO: 190 - protein, 532 aa, Methanopyrus kandleri
VEKVREARIARTLATQHPDATKFVRVQEEPEEAVECLVELGAEEYMVDFEGKLTPYLQPIQVLMELYDAGVRVGEERFVIVRVPSATKENVLRQVQALLGVMEANSELLKEDPDARGIFEVVHPMTSSPEELVETVDRISYARRFASRELDVPLKAGNLRIIPLIEEVPELLDIRNILTGYVEGMREIGMDVSYLRVFIGRSDPALSYGHLPAVLACKLAIFEVYELSDELGVPMAPILGGGCLPFRGHIRPGMEEEFVEEYAGTATYTVQSGFRYDHDREKAVASIRRINELAANDPLQLSGDDIEYLVLATAIFMKHYLSVFFRCIGTLNIVADMIPNTRDRLARKGPVGYARDIPEPDRVGAQCKDLGDVGRELYRELRRMRVEKLPELPRAIKFTGACYTVGMPPELIGTGRGLAEIEERLGEDALDAVISRLYPMLREDLQFAVEYTFLETAGSVLPSSGVAMVNTDLEYCVEYLDLEPPSDFEYQNLVHTLEPYLRYVVSEGGVEEVNPFVRDLLLEMGRMRGSLG

SEQ ID NO: 191 - protein, 258 aa, Methanopyrus kandleri
LKLTILASPLADRDVLRRAERLADRFNLEPRIVTDPEDVPDSPTVALVATGGTEDTIEALLERSSAVLLLHWHSYNSLAAALEVGVSTLHVGRAEEAIRAFKRLVGTRILVVGGKCSWIRGPDPSDLPYLQTVEVDLEDVKSVDPDGSFEEKLRAHGIDPSELNRNFLDLAGKLHAVLSQYGANAITGDCFSLYEEFGAGSLSVLLRAGRALLLRGRSRRPGHDPANARAYPSLHRKRDRAGSLRDASRPLCLPVGVA

SEQ ID NO: 192 - protein, 818 aa, Methanopyrus kandleri
LTVREVYEELREVVLEKLGKGEDPLPQILGQREVKIQVLSALIAGRHVLIEGPPGIGKTTLARAVADLLPPAEVVKGCPFHCHPKEPVCPLCRARDEDELETETIPGCERFVRIQGSPDLTPEDLLGDIDPIAALEYGPTDPRAFTPGKLLRGNRGVVFFDEINRCPEKLQNALLQVLEEQRATIAGYEVDYPANFVMIATMNPHEYAGTEELSEVLLDRFDTVKMTYPKSKETEKRIVVERGEDFGVKVPEYVLEFIVDLVRATRDHDDIERPASVRATIGLYERAQTHAALQGRSKVELQDVIEVAPSVLRKRIKLSPRVQHVKSEEDVIKEIIQEVLEGYGKTEVPDTDGIPGKSKPDEGASTGAPEGRRRSRRWRPRRTQEHPDGARLGSEKRSRSDSRTVSRSESQKTSATDSAADGEVLDDEYHRRLRFRALTKEDQRKYVEGEPEYVFAARVLRQLLNRGIEYIRPDQLAESLVTSAAYVKGKYGRRFIEEITGWSYDEIASQQHDYSLIDELEEEIQRRLEILQKLGFVRPSYQGGVSLTLKGRELAAFSALIEELEAFEGTEFGHHAAKRLSERGTGSRSYSREYRRGDPYANLDVRGSLRTAVRRGRREILPEDLRSFDREEEVCLDIVYVIDTSGSMSGDRIDAAKRAAIALAHFSVKAGDRVGIVGFNTKAEIVVDITSDVEEIITKVMSLKPGGATDIGDAIRVGTELFRRCGRPDRDWHMILLTDGVPTKGEPDPETKALSEATAASRMGVTISTIGIKLPEEGIRLIEHIAGISGGRSHHITDPEELTLVTLNEYRRAKGMGP

SEQ ID NO: 193 - protein, 233 aa, Methanopyrus kandleri
MFPSVPSLRISPGVGPGRRVNPVMEIVKHYEDHPIMKKLKVRRDPFRALIQAIISQRTRDDVTDRVAERFLRKFKTPKDVAEVNLKDLVETLRDAGLYRQKAKMIKECCERILADGLDLEEIVQKPTEEARRELMRLPGVGPKTADVVLLFAGGHDVCPVDTHVARVSRRLGLTDSKEYFEVQEAVHEMVPEGERGKAHLALIQFGREICRPRKPQCELCFVRRFCPYGGEQA

SEQ ID NO: 194 - protein, 419 aa, Methanopyrus kandleri
MGRIIRIPVHGFVELQGAEERVLDSPEVQRLRRVRQLGLAELVYPGATHTRLEHSLGVKYLCDRVMEIHWEELKRNVPDVGKFSRSYIEEVLGLAGLLHDVGHPPFSHVPEPLLEEELGVDHEDIGRAVAKVVLERADAMDVEVTLEVAFGPGDGWTGVLHSVIAGNLGVDRLDYLMRDSLHASVEYGRIELDRLLHTLELGDPVVVHEKGLEAAESVLISRYHMYRAVYFHKTCRAGDAMLLWAMHVAAEDGDLDLRIFDPDRLSRSEDALSAFQSMDDSALLRALEENPESREFVEVLKNRRLYKCVAEYQAAVEPRHGELFKVAVETSEEHLGESFGVLLDSSKVVPYDPSSDEVIVRTRNGDVPLSEVSDIVATLKERTLSEIPTVRVYVRPETRDDESRVRRIVEHVKSALPPA

SEQ ID NO: 195 - protein, 249 aa, Methanopyrus kandleri
LLSGDETLTVYLARVLSCPELFRVSTPEEARRIAEKILSGEIEPPLEFFGLRRDAVNEVLAVTDGPAGENVAPVGLRVRGDSIVVNLYPGSRTYENFVRTEELTACIVPDPIRFLKALSKELAIETVGDGTKVAEGTRAYLELEAKEIHEGKPLTAELQVVGWGLLHPRPRALVRGESALLEALVELTRIHLDEDHVDACKRALEVVKRTIWSEEYQWAVEKVERELRGKEDGPDHQDTSPRIRRATGG

SEQ ID NO: 196 - protein, 298 aa, Methanopyrus kandleri
LVNEPERIAVSLTLGALLEVSSWPKPGNVHRTRDFDDTRFEHFLASAVAAQPVLREVAEMATRGERVPLGRYLYEAVRHSMSAHTGGNTNLGILLLDVLLASALARASLDPSDVRREALKLAKETEERDAYYLYRAIRLAGAGGMRRIRGSRAPDVSRPEDVLEKGITMYEALQAAAHRDAVAEDWVRGLERSLRIGLRVIELREEYDINEAVVRTFLEELATRPDTLIWRKHGFRVALRVSEAAQEILRIAGDRPVTETRALYELDRELHEDGINPGSTADLLAAGVGYACYLGMRP

SEQ ID NO: 197 - protein, 153 aa, Methanopyrus kandleri
VAEIVVRFDHRVIEKIPRRPHPVFELIGFIFSGWVLFPSSLILMLFDRPLGFQVLEALVLSMVSSEILKVVVGRPRPQREGRTPWGYSFPSTHTARVASLIPVFWKLSSNLGIVVVVVAIIVAISRVLSRAHYPSDVVAGFLLGYVVGWFVIW

SEQ ID NO: 198 - protein, 335 aa, Methanopyrus kandleri
LKHSPWGRDGLYPTVRMRRYRKSEAIRDLVAETEVRPDDLIYPIFVREDGKTHEIPSMPGQRYHSVETAVETVRELLDLGLRAFILFGIPREKDPEGRVAADPEGIVQRTVRALKEEYGDDIVVVTDVCLCQYTTHGHCGLVDEDTGKVLNDPTLEVLAEVALSHAEAGADIVAPSDMMDGRVKVIREALESEGFDDVLIMSYAAKYHSAFYGPFRDAADSAPEFGDRSTYQMDPRCFRQAIRELELDAEEGADILMIKPAMPYLDVVREARRRFDHPIAAYQVSGEYAMIKAAAEAGYVDYRTAVLESLTCIKRAGADLILTYFAPEVVRWLKS

SEQ ID NO: 199 - protein, 302 aa, Methanopyrus kandleri
MRTVGYNPSLPHGECFKLIRGRKESRETAFGVVDVFKEAFIKWSEGWARLKEFDREEMLSAYSSFFRSRFGVNFKERNVVELLNLIYRIAVEYRNILDVGEKTLTGKLRTYFIPVIMVIMVKQFYGRIKRKEAMKYVRDALQFYKTAYELSGREEGFEEILVGSLLPIEVRKGEKLPKFFEESFKDSTIRKFLGLESESGSVKFGLGCVFIPSWQFRELRAEIKFGKGFGRDGGYVEYVVHRAGTFRECLLMVPQLRLVLVENADTPDKRVFLPFDMLELVPPDPAARMKLESLAVKLTRPS

SEQ ID NO: 200 - protein, 404 aa, Methanopyrus kandleri
MEDLVCVGITHKEAEVEELEKARFESDEAVRDIVESFGLSGCVLLQTCNRVEVYASGARDRAEELGDLIHDDAWVKRGSEAVRHLFRVACGLESMMVGEQEILRQVKKAYDRAARLGTLDEALKIVFRRAINLGKRAREETRISEGAVSIGSAAVELAERELGSLHDKTVLVVGAGEMGKTVAKSLVDRGVRAVLVANRTYERAVELARDLGGEAVRFDELVDHLARSDVVVSATAAPHPVIHVDDVREALRKRDRRSPILIIDIANPRDVEEGVENIEDVEVRTIDDLRVIARENLERRRKEIPKVEKLIEEELSTVEEELEKLKERRLVADVAKSLHEIKDRELERALRRLKTGDPENVLQDFAEAYTKRLINVLTSAIMELPDEYRRAACRALRRASELNG

SEQ ID NO: 201 - protein, 82 aa, Methanopyrus kandleri
VSKSEAMAHLSVMEATYNVKIKNKEEAAEAIAEKAMEFGVEPIHICTALNTWLARMMSEGEIEEGDEIEIPRELIEGIEVKG

SEQ ID NO: 202 - protein, 231 aa, Methanopyrus kandleri
MPRLCFVLAESELEFIPPKLRGHQHVVRWAKRRGKKPGECLLIASKHHVAMRDKRLPERDRRGRPDIVHVTLLHVLDSPASRENALDVYVHTRHDRVIWFRGDVRLPRDQYRFIGLMEQVLKEGQAPPDSDEPLIEVLDVSVWDVLEANEVNVLLSERGDLIEPVGYMAGLLDAGVERIGVVVGGFPKGDFSEEFYDRADDVVRIYDEPLDAWTVAARIVTAFELAAGILG

SEQ ID NO: 203 - protein, 232 aa, Methanopyrus kandleri
VTSLVITDIDGTITGDDRAVHLKCIRYLRELQKRGIPVGIATGNTLCYSRSAATLLGFEGPLIAENGGIVAVDDEEISTVPEEDIELIQEAYRELRRRLGVRRTEPPGLRRTEVAIYRDVPIEEVERVLDGLGYSGRIEVVDTGFAYHLKSKRVDKGKGLLVICERLGIDPDDVVAIGDGDNDAPLLKAAGLGVAPANATENVKRIADVVLDAENGEGVATFLRKLLEEVDA

SEQ ID NO: 204 - protein, 343 aa, Methanopyrus kandleri
LKLYPLVRKVLKLLSSADSIGIMADTDADGVSGAATLCEAFGVAEDDVWFPSGGFYGVPKDALRDMLEDYDVVVTVDLTPPPFPEARDRVVVIDHHPTDSHYPMTVNPYEIPALPTHTSASALVGMLAHRTGGLNRPWVPLIGAAGDGMEGGAVYETLASMTDPGYLVPSRGRNLTPLQDAAATVNAARRVKYDVGAREALKVLMSADSPYDVTESHLQRYRKRVRKHRAIWSGEAERTAHIVEGVGYAEIHTEVDVEGLVARDLVDRLNLRCSVVVNLARKPCGLYKASGRSQGFPVNELMVKMARWLEGSKAGGHPNAAALHFSDGDPREAFNRALDLLQP

SEQ ID NO: 205 - protein, 535 aa, Methanopyrus kandleri
VKFVVITGGVVSGIGKGITTASIGRILRARELEVTAVKIDPYINVDAGTMNPFQHGEVFVTEDGVETDLDLGHYERFMDVTLSGAHNITTGKIYQRVIEKERRGDYLGETVQVIPHITDEIKSWIREVGKASGADVVLVEIGGTVGDIEGMPFYEAVRQLQLEEGRENVMFVHLTYVPYLEHVHELKTKPTQHSVKELRSLGIQPDAIVCRCERPLDDGVKRKIALHTNVPREAVIDAHDVDLVYKVPLLLERQGFGDYICERLGLDADEPDYSDWLDFVTRIEEADDEIRIAVVGKYVDLPDAYISIREALVHAGAHVGVGVDVAWVDSEALEAGDSEAWEEVKDADGVLVPGGFGKRGVEGKIEAVRYARENDVPFLGICLGFQLVVVEYARSVLGLEDAHSTEFNPDTDHPVVDLLPEQRGVKRKGGTMRLGAEPVVLEEGSLLRRLYDDREIVLERHRHRYEVNPSYVRELEDHGLRFSGHSPDGRMEALELPDHPYFVGTQFHPEFKSRPGDPSPPFVGLIKAAAGQGPD

SEQ ID NO: 206 - protein, 241 aa, Methanopyrus kandleri
LYSMRVVIEETDVTIRADSKESVSSAAKAVKLHRSELDRYVAKDPAFVTAKVPVRTLEGAPEVAKLMSRAAEPFGVGPMAAVAGAIAELAARASEPTVIVDNGGDVQVRARRSVVVGLYVSDDHPLSGRIGFEIEGVLGVCTSSGKFGHSYSAGKADAVTVFAERASLADAAATAICNLTSGDDPEAAVQRALEFADDFTGDLIEAAVVIRGDFVGISGRPPKIVSLRGGRIKPARLEPTI

SEQ ID NO: 207 - protein, 203 aa, Methanopyrus kandleri
LPEIVLVGRSNVGKSSLIRAITRGAADVRVGKRPGVTRKPVFHELDGELVLVDMPGFGFMSGVPRRYQERVKDLIVRYLEEKDNILFAIHVVDAKALPEIAERWERRGEIPIDREMFQFLNEVGLDPIVAANKIDKIKPIEFEEHMDAVAEALGLFPPWRQWLDTLFPISAKTGEGLVEFLEALQERVRKAGYPEFARFFRTK

SEQ ID NO: 208 - protein, 57 aa, Methanopyrus kandleri
LGKKMEKKRAEMPPARAGILSFWDEEAPGIKIDPDYILYACFAVAVLLIIAHTMAAV

SEQ ID NO: 209 - protein, 91 aa, Methanopyrus kandleri
VYRDTAAFLVEGLDEYLEDMEPSDVAEAVLKAYFEDVERVEEDDTIIFECRTSFPMLRFIHDYAEEHPEFEKYVKPEGDIEKRSEVLEGEN

SEQ ID NO: 210 - protein, 413 aa, Methanopyrus kandleri
MSDTETIETPSGERPLLPPKARLTFSRTMPAALPETVEHTVRLYITELEHVSSNESLRIEEKKDGTNVRVVLGRVLESELGEPVIAHTRSWVRVEEVEEYVQSVLDPSEHSLTIVEGELLPLSLFGTSVFELWNETLDYIDYHVRLMSRYTLNPRRKRVPRAWLGKLFDRLSKVRRHVRTLYTIQRRLPDVKLADDDEFQRLHEEIERLTAIAHDKDYVPEDAVEILRDILSVLDDLAAYEPEDSEPVYYVYELDMYDGEITIQKPKIRQYELLADMIDGDRIKPVPSTLCDLGEAEQVARELMNRVEEEELEGLVIKPEKEVPGVPHARKVRAEWYLRGMKLGSRLSLKGFAGAAEKYARNEVRRALAAIETSYLYRALEALAEGDLRRASRIVKEAEEVTDRMSEWDDPTV

SEQ ID NO: 211 - protein, 223 aa, Methanopyrus kandleri
LTRVERLEELLSHAVSQRSGRIRVVTDVDELRLDEEVVRRIVHRAAELDHALVESAPEHVLRGERAQEVARALDDILRSVLELVGVEEETERDLDDLFKDSVLVVVRGRERKALRELVDAPIVQTGGPLVPEDYRKVNPNLPEKLPEGLVKSVERARRELEEYIRKSGAKRIVLVREEDDRVGEVLEEELPEVAEELGVDHEVIVVPDFTELSPSDLLSGRTK

SEQ ID NO: 212 - protein, 291 aa, Methanopyrus kandleri
LVLERIGRFVWKFTAAVGYVTVNLPWIVVKLLKEGPKRSAKFTSQLIRTAEESASKFQTVMEMVREGQVLLPELPQVPFKDIEIRGKRIAAAPRMPWDVPVLVLQFSLLATVVFVILEEIVAPPVMLWEALAVISAFVTAFSLGWLRRVSPSEDIHWLPYWHSTLIILGSVVLSAILTNVPPVVALVLPLEGVLPGFIVFGLPALGVAAATVWVRRKFHRTWTFGVVLREVQEGGSVEVVVGHDIAANTLPGEYIVEGSGSEGTPVLVEVEHSGFSLTGARPVRILKEGWW

SEQ ID NO: 213 - protein, 293 aa, Methanopyrus kandleri
VRVVPLGFESLGVRSMATLIETPDVTVLVDPGVSIPPKRYNLPPSEEEWEALEEVRESIQRAADSADVVTISHYHYDHHTPFTDRKYEACDLETAKELYRDKLILMKHPTENINRSQAGRARALIEGLDELGVDYEFADGKRFEFGETVLEFSQPLPHGPEGTRLGYVLGLRITHRDHVIVHASDVQGPVYGPALEWILERDPDLVLISGPPTYLLGFRFSSDNLEKAVKNLRKLASRSGQIILDHHLLRDKNYRDRLSEVYEESDNVASAAEVLGKEERLLEAYRDELSGEE

SEQ ID NO: 214 - protein, 139 aa, Methanopyrus kandleri
LSGVKRVEFDARLLDSLLEASDKNHPDEFFAMLGGSIDAETITIDSLIVVPFEASDSGAIFDLLSVHTCDVIGTFHSHPYGDPVPSEDDLMLFKRLGAVHAIAAYPYTPDRVEFYDKSGRNITPVVEVRYTADEEANNR

SEQ ID NO: 215 - protein, 296 aa, Methanopyrus kandleri
MDLAGGWHVGAAFVTVATLTTVLLALLTYSIGVVGRWIKAPIATTLGAAIIGAGVGLFLLAPMLSDIPKVVAGLEKNGYLTVELSTAPSDLPKALEAVKKYRGKPVGRYLELEVAMSEPVPSDRRRWFESKVPKVFPGVKDVRFSSPTKMVVRMDLKSVPPSKVSQLADELSGWITYTSGFVVVGVTATIDVEVPPSEYADLKGEIREIADLRVIYDPTKAAQRRIARMLPSPRTTVIASTLAFAGIAVIGWYGISHIIGPLTSPLRRSAEGRRLVRREKGRIRRETPGLPPRGKR

SEQ ID NO: 216 - protein, 115 aa, Methanopyrus kandleri
LIEKVLADLNRVEGVHGSLVVSSDGLIIAEAVPPDIDSEIVGAIATTVYGSGERVVDEMNLGDLEQMLIEATHGKVMIVDVGEDATLVLVVEPDANLGLIRLRAREAAEEIAKQL

SEQ ID NO: 217 - protein, 247 aa, Methanopyrus kandleri
VIRRALDVIGEQLDVEKLVEEARKDLTSALNRVTEYFGLEKLVVLDDSGKPIGIVGDGRMEGGLINAVYTIRESLGDVDTILVTSEDSTNYLALCLDEYVVVCESKMTLSDADIFMLKNDLGKVIDAAVSGQRVKSEIPFVVIDEHGLVILSNVDRCEEVGALISQLYRFVKDHVEGSIEWIKMTTGENKTLAVKPHNDFLIAFVVESDVEDADDACEETVKTLIEKVERAVAGSPSPPAEKGEGLT

SEQ ID NO: 218 - protein, 269 aa, Methanopyrus kandleri
LAEAELPESEACRVVCMASGKGGTGKTTVTANLGTALAELGAETYILDADIAMANLGLILRMEDAPVTLHDVLAGEADIEEAIYEGPHGVKVIPAGISLEGIRKANPDRLRDVVEHIIDRADFLLIDAPAGLGRDAITALSASTESLLVVNPEIASITDALKVKAVAERVDTQITGAVVNRVTKDKTELTKEEVEKILETPVMVEVPEDPEVRRAAAFGEPVVVRSPKSAAAQAFKKLAAELVGIEYEVPVPDKEGVLSKVIKGLFGRR

SEQ ID NO: 219 - protein, 166 aa, Methanopyrus kandleri
MKVSRRHPISEKDLQEVLEELRVSSGVSLGEVLTGLVEVAYVKDDDIERLLIKDGKVMAFERHEGWFPTIHALLQLDEGNYGHVVIVDMGAVKPVASGADIMVPGIVEVRGEFEEGDGVVVIDERNRRPLAVGIALMSAREIEESERGRAVRNVHHVGDRLWEARF

SEQ ID NO: 220 - protein, 73 aa, Methanopyrus kandleri
LRPHDCLRDFLDDIVIVELKTGKTLRGRLVSFDGHLNLVLDDCVEIDEDSEVRLGRVLIRGDSVTLISPAEVG

SEQ ID NO: 221 - protein, 62 aa, Methanopyrus kandleri
LAKGTPSFGKRNKTKTHVRCRRCGRRAYHVRKGYCAACGFGRSRRIRRYSWQNKKVNRKRRR

SEQ ID NO: 222 - protein, 291 aa, Methanopyrus kandleri
MARDGRRKSPVDVRIIVEGAADAETISKVIQRMALGGEYNITVTSIIPTTHAHIARRTAEGADLVLIATDADKPGRKLAKKFQEELRGVVGRVERVKMPIGHDVEHVDLEIVEKELRSALVRAGLKSLRDIKELREEIKELQEEIEEKEELIEELEEKESELEELRERLKEIEKEKALLEEERDRLLDEVERLRDRLEELEEELESADHLRIMDLESVCEEAELSPEDVEPEVLEELGEELEIPIVVGSTRIAAPSREDAVRVLKIYKLARKVVDGEGEEENETTPGDPEV

SEQ ID NO: 223 - protein, 327 aa, Methanopyrus kandleri
LKSDDFFLEKVEKLEELAEGEPCALVRRQNVEWITHFPGLAFHADFESEEYTLVVHRMDSRAVREWPIPETVEVITHDEANRLTPARAVDDESAARKVPCYRVKNVNEDVTRARLSKSKSELRFIEELVEATERILVKVLPPEDSEAEVASDLIREATIRGFQTAFDPIVAYDEGAGVPHHRPSPEEKTWTKCALVDYGIKMVYCTDITRTVVSENEAGDVLEVVVNALEEALRELQAGVNPKELEEELRGWMEDEAPGFEFPHSLGHHVGVTVHEGRLMGRLPEGAVITVEPGLYSDEFGIRVEEMVVVGKRKCRTLTKLPRVWER

SEQ ID NO: 224 - protein, 378 aa, Methanopyrus kandleri
MPNANQASAGVGALKEVLPGIRALGDLEAAEKVVKRCSGGSTVMVCVIGSTEISRVPGISAAGKTPESTFHTPAGDVELIYYDRIINAEEVPQNPVGAPSPAVITKAVVNLASIPFLTVDAGAAVKPACPYIDLGGEVARDFREGPALSEETYDRLLEFGKTLGKELTRDVDFLTVGESVPGGTTTAMAVMTALGYETSEKFASSSHDSPHDIKERVVKEGLEAQGVEPGDLDAHEAIRRFGDPMMPAVVGIIYGSRTPVLLAGGTQMAPILAYLAEEGQLDPERVFVGTTKYVVEDEDSDIESLFRQVGDYVLFSADPGFSESKFRGFRLYEEGYVKEGVGAGGAQVAAALKTKGEITPKDVLRECERVYERWMDKF

SEQ ID NO: 225 - protein, 244 aa, Methanopyrus kandleri
MSTDEWLRELERALKRAEDTDMILNPALGIGVVVLGPLASASVSVIATVCVATASGASVVSAGGTALTVGTVVLFAAFLAVNAALFYILIRRRNKHFERSSELFRIVSEILYRTECISKSCYLAIFRKVKDIEELGHLDEVLWIFLGTITFGVAYLYVAYRLMRDFYLHEARESAIASLLADELDMCISFFRKIPYRNFGIHILIVVFFPILYPYLVYILIKDPNNHFLEHRRFERTLVEKLFS

SEQ ID NO: 226 - protein, 350 aa, Methanopyrus kandleri
LKMTRREFVRKLVRRIHKEAETLDRDVTIMHVCGSHERTIVEHGLRSLLPENVRLVCGPGCPVCVTTTGELAAAIKAAEDGMVVCAFGDVYRVPTPVGSLSSCDGDVRVVQSVRKAEEIAESEDRDVLYLAVGFETTAPTTAAVLLDDPPSNFYVLSAHRLIPPAMEWLLESGECRLDAFICPGHVSTIIGTGPYESVARELPCVVAGFEPEDVLIAVLACLKMLRRGRVGVTNEYLRAVEDRGNPVAKELMERAFEPEDRPWRGFPTIPESALKLREDLADHDAIEIGIRPDYTLGHDESCICDRILRGLAEPRDCPLFGTKCTPTDPVGPCMVSEEGPCFIEYRFGGG

SEQ ID NO: 227 - protein, 92 aa, Methanopyrus kandleri
VCLAIPGRIVELDGNRAVVDFGGVRQEVDVSLLEDVEEGDWVIVHTGFAIQKLDEEEARASLEIWEEVLKHIEEELENDTSGVREKARPSNP

SEQ ID NO: 228 - protein, 140 aa, Methanopyrus kandleri
VPWEEIEHTADAAFRVWADTPEDLLVEAAKALFDLITDLDAVEPEEEVEIEAEGGDLVELLHDWLEEIHFRHEIDGMLFSDFEVKELKKEEGWKVRGVARGEPYDPDRHPFHTEVKAVTYHNMKVEREDGRWVAEYVVDL

SEQ ID NO: 229 - protein, 392 aa, Methanopyrus kandleri
LNLDRYRNIVRETERKYINVNPIQRGGVLTPEARKALLEFGDGYSVCDFCEGLLHEIEKPPIRQFHEDLAEFLGMDVVRITAGARYAKEAVMSALCEEGDVVVADSLAHYTTFVAAEKAGATVREVPNTGHPEYKVKVDEYARVIDEVEDERGDPPALALLTHVDSEYGNLADAEKFVKICRKKGVPALLNCAYTMGRMDLSNLSPKPDFMVGSGHKGMAACAPCGVLAMREEWEEEVLRGSSLRGDVSGREWPHKEVEMLGCTVMGAPIVTMMASFPHVVERVKRWKEEVRKTRWFVKEMERIEGVRQLGERPKRHDLVKFETPGFHEVAEDHPRRGYFLYEELKKRGVIGIQPGQTETIKASVYGLTDEQVEHVVRAFHEIAEEYGLEVS

SEQ ID NO: 230 - protein, 207 aa, Methanopyrus kandleri
VRMVVLFSGGPDSLLAALIACDEYDPEKIILATYDNGVLIGVEKAGINYSQVKRATDAEVEWRIFDIHGPFHRWGLRGLERRILRFGWNPVCLDCKFCMLFHALEKLEPDVIVTGDRESRKYPEQTPEAKAFWEEMCGEYGCEYFTPLWDWKKRGVYEELARRRVSVRGSEPKCMLAGSWKKPVSEEKVERYLEGLRKRLLGLRSTP

SEQ ID NO: 231 - protein, 180 aa, Methanopyrus kandleri
MAESVKEVIDLTEIPFQPMDRQEIHQLETVLLVATLFRPKVLEMIHEQKFLTWVDSLAVAASALARQKAGYTISEIAEELGRTEATIRKHLQGETKAGELVLETYEMLKSGELQIVTGVEDIKEKLRVEEEKVERLKSEMEEVSTTISRVVEGLRECCTKMEDALEELEGLAEKLEELKE

SEQ ID NO: 232 - protein, 251 aa, Methanopyrus kandleri
LFVKFDSHVHLDVRCEDDMKTMSLAGIRYVLTLAHDPMPFRTAEALLGHWEAVESTAETAVDYLIDAKVGLGVHPRAIPDEGLELALEHLESKLSDLDAVGEIGLEEATDEEVKVFREQLDLAATEDVPVVVHTPRSRDPNVISKIIEVARDSDLHPDLIVIDHLNEQYVDAVLAEGFNAGITVQPGKATVEEAVEIVTNRAEHADRILINSDASRALSNVLAVAEVAFELEKRGFDATEAVVRDNALQLF

SEQ ID NO: 233 - protein, 223 aa, Methanopyrus kandleri
VRLAFIGGTGHQGFGLALRLAAAGHHVIIGSREEERAVKAAEEAEEILAEHGYEDVTVEGRENSDAAAEAEVVFLTVPFFAVIDTVKAIRDSLDEDAIVVDVTVPLETAVGGKPTRLIRPWAGSAAETVQSLVNNPVVSAFENVSAESLRDLEKEVKCDVVVCSDHEDAKRTVMELAEEIPGVRAIDGGPLENARIVESITALLISLNMRYGKEDVGIRFTNL

SEQ ID NO: 234 - protein, 429 aa, Methanopyrus kandleri
LRDFLRCVEDDLVVVKEELSPEYEVPAVLQELDRPVVFEGVEGYDIPLVGNLCCSREYLVRALGAESWDDVLRKLAEAMDSPKEPRKERSPSFLEAERGPEFLKEFPMCRFYRTDGGPYLTASLVVAVEPEEGIPNASVHRMMYLGDGKFAVRVVPRHLYRYYEKADHDLPVAVCLGVDPRTMFACCARVPYEVSELDVAAAFWEDLRVYEVDYGIPVPAESEIVMVGRLTPERAPEGPFVDVTRTLDERRREPVFEVEKVYTREDPYHPIILPGGEEHRIMMGGPAEATVLAHVSRVSEVVKVRLTPGGGRWLHAVVSIRKRTEGEAVNAGLAALAAHPSLKHVVVVDEDVDPDDPEQVEYALATRFQADRDLHVVRGLGSTLDPSAEEGIMAKAVFDATAPVEKRERFEVVEVPVSDRVRRILDELP

SEQ ID NO: 235 - protein, 346 aa, Methanopyrus kandleri
LRDRGHVSVVAGGQWGDEGKGKIVAYLAVQDEPEVIARAGVGPNAGHTVRVNGEDYGLRQIPCGFPHEEAELAIGPGVLVNPEVLLDEVERLSRFRVDDRLIVDERCAIIEPKHIEAERASKHLSDEIDTTGTGCGPANADRALRKAKLARDVDELSEFLGDVPGLVNEAIDAGEDVLIEGTQGFGLSLYHGIDYPYVTSKDTTASAFASDVGVGPTRIDDVYVVFKAYATRVGEGPFPTELSREEVIEKFGEEILEVERGTVTGRPRRIGEFDFEMAKRACVINGATQVAITCIDRRFPDAAEAETWHELPTEAKKFVEKVEEAVGVPVTIVSTGPELEHTVDLR

SEQ ID NO: 236 - protein, 629 aa, Methanopyrus kandleri
MGRLVDSTAVTVAALLALIVPVNAHVYVVVNVPDQVHTKYHWMRVFVTAASLDREWAGGNAASVIPIAVQGKLDKLTQNLMSEVGPSSVVLTYKYPATHPGWERLPDDLEAACVRLVEVAMNSGVPVKFLLCLDSDAGFIPGLELAPIVAKQQGAVVWGNPLTYMTHFDVPVLTLDEYLRNPEYDFSDLSIRALAVVQPLAKPEGPYKSQPFDPITLAAVQFACMRPALVAFVTVGGSLNVDTLKQDVRDRFLSAYGKELKGLDDVEYVVSFGSVLLGSPKFDVGVACFPFHGLPGFLAANRMLVSMHLHGEASPLVVFDPTGSLSAYYGDIQHSVTVKWLSVPDVNSLNLKNQKFAAGIVVFKEALGQNFLQSLNSECNSFLFICADPNSIAQRVDVYATPNGFPKFRAVIAFRDPAGAIMAYLFAASGVELGRAVVWACWELEQLRGYVDVSPGYLLVGDPFYRFEGPFEYPLPNLPEGKDLNVKLPRAFLVPADKYRLVPLIFPAFVTGLTKIPKDPYSTVLADGLNFVAKRLGPNRYSVSGILIHPSGIRNAYVLPLNESDKYHVTVTLELVTPQPSPPASWRKVPGVSVCGIAVTLASLLVVSGATRARARSWRTSRSRTSRRS

SEQ ID NO: 237 - protein, 618 aa, Methanopyrus kandleri
LRGPWIPALALLITLIGSTSAAPTVVLDESHLVVFKVPDANGQVVEKGAGDNPGYRVPPGDSGNYGGYKFPACAYWVPYFSLLSYEDADGRIHVFPAVTRGSQLGVMGIADHVINEVLPSSPRIEVDLSSGTPDPLELFTALGYSHLVLIVSEYDSLAISSALALKWKAVEDLRRRLPEAAEHPEKVGVVIALMARATVISPTETKDVLIPLVPGAHVINPASPFTWQGVENDPFYRLCVNSDLIVVVYKTEAFREEARLVFGDDAIYVRASADITAGAPAVIFNVPRRAESWRVAQTFEPWPSSLYLGALYGLPIAWAAEDLRLTGYSWEGVILVPSPAESGMYWDITSEFDEVLPEILGANPHIFLSYMTLTDPWNNSIQVGTPNFYAALPCLGHYPWDLIGVDLTTSTLLFDLKDYLVVTYNRIPEGNDQELGWGLVGPYAVVFEGPKGRPLILTWYALASGFCEWAWNRYLEFNRIPDQLYDVEAVAVGLEGVFALAKGLILGDINNVLSNRDYRFTVFFGYPIRSWETEARIQFDADAPNRHYTVIMGRGDSPVPDVPFMLAQSSDVYAILTLEPLRTDTGPDVSPNNAKRWVVTPWVALSIVPLLLSRRSSR

SEQ ID NO: 238 - protein, 455 aa, Methanopyrus kandleri
MLREAVKDIESGHVDPSERIHEYLEKIDRENPDINALIYINGGAPEEVGSEGPLAGVAIAVKANINVEGMPCDCASKTLEGYRAPFDATVVRRIKEAGAAVIGIANMDEFAAGSSGETSCHGPTDNPRCPGRIPGGSSSGSAAAVAAGLCDAALGSDTGGSIRNPASHCGVVGFKPTYGLVPRQGLIDLAMSLDQIGPITRTVEDAALLLEVIAGPGEDVEGTVRNAEVPRFSELLDPEEVEGMRIGLVREFLEVSEPEIAEVAKEAARALERAGATVEEVSLGRKLVDVALPTYYVINYVEFFSATRRFDGRRYGRRIEHVCGKEVLRRIVAGAAISRQEVRGQYYERALRARTWIRRRLLEALEGYDALLGPTVPKPPHRIGEELSVREMYGYDVLTVIPNLAGCPAGSVPFDTINVDGDRVPCGVQVIARPWEDLTALNVMAALERAASFEP

SEQ ID NO: 239 - protein, 146 aa, Methanopyrus kandleri
VTRSYLVFDVGRYRELAEELVKPEDIVVEVGAAAGDTTVRLARNARLVIAFEKSEEMFERLRERVRDLDNVIVLCEDGFELGEVLKRTERVDAVFIDVGGGAQPRLALALWEAYYSRFRPRVIVVRNRRLCRLIETVERVECDEEV

SEQ ID NO: 240 - protein, 290 aa, Methanopyrus kandleri
VSPLAEGNEPREGHPHHPSREELEKRLEKEREAIEKNLESVEHVLVVMSGKGGVGKTTVSVNLALALAEDDEVGILDLDIHGPNVPEQLGVTEPPQGTPAGLFPLSGYRDVKVMSIGTMLEREDLPVLWRGPRKSGFIREILVKTRWGDLDYLIIDMPPGTGDEVMTALQMLPEDARNVLLVASPESLAFSDVVKAGEAVDKLEARLIGIVSNMHGIVCPECGSTIEYFSDDYSEKLAERFDTEVLARIPLDPEAKRKAEEEGKPFVIAAPDSRVSEAFSELAEAVRDRL

SEQ ID NO: 241 - protein, 288 aa, Methanopyrus kandleri
VHAMLVALVASAPATLAACAIFKFLDGPLYEPVRGGTPRGVGVIPALIYAYLAPLTHGVPVAAHAVLGFVDDALGRTPTRFGVEVGHLARGTAMLVAFGWCWWKFHPITGLVAGFLPQPANIVDMQPRAFTFAALTATVATLPWWNPTLVSVAWAALIPYVLLDLKGRVMLGDAGNASVATALLLACTRGDPIGSIAFLISFTLAGAFYRFKVEPRLREYLEERLEIEDPTLMDAVWDVLTGGALGDLIKAKTFGRTEVPECGRLARLLGYRRLVLIGRSTVGERVRR

SEQ ID NO: 242 - protein, 394 aa, Methanopyrus kandleri
MGRFERNLAAMFTEYALISTLQALFWIVLPRTLGPQQFGKLVLLINLAGFLSDPIHQAVAFACSPELLGLGDRERASLCVSAVIVSLMLSFAVASAMLLAITFLPVPEKLRIVSDPWVASGLLVLCMSPVTKVVEPFLLAAGRNVFVVAIALGHAAKVVIPPLLRTSWVGAAICTGLCPLLAGLATLPLVGRPRGWNFAIGYLTRGMVIVVDRLVELGSYAYAVLLTYLLYGSKTSAFVGLGLAAYKFAALTLEAFVPPITLEVGAGEEEQAFRGLRRYLVPASIATAVAIVSCADLAPVVLSTEYGPAVPIVRWFSLPTLLLPYHIALRAYLIGSRRLRLLLVYRTLYASSFFVILHTLTGAFGPVSVPLGLLAALSSAPPMVAMIRRHTVTE

SEQ ID NO: 243 - protein, 375 aa, Methanopyrus kandleri
VSTEWVTRHLDYDGEETWLIESHGPPDDPTPPCSPTCRHCYATQLPPDARRHLVIDELSMYPSELVNHPRLEDVVRRARELVESRENLPLKVITSGKFLTGRKLRILLRYVDQLDFHLLSTDPSERAKLTRESVREAARVLELVREAAREVDTVANVVAVPDYNLNSLPRILRNLDEWGLHKCVVIPVGVTRYNREGIRPPTPDEMRFLWEICRRMDRELDLDVVPCDSLVPLEEHLEGLDDLASRCAEALGGVDSRVGLVTGEMFGPVIEELCRATNEKLGREVLEPVIVENRYFGGNIGCAGLLTGEDVLHELEHRDLDVAIVPRISVELGSFIDGVTIFEVSLHAGCEIVVGPERLEDLPDVLVEITHSVTV

SEQ ID NO: 244 - protein, 676 aa, Methanopyrus kandleri
MGVRSMEARWELEWEGEEPEGAGIPLSRFSKRLPDVEAYRHQVETAEAFENGHVLLTAGMGAGKTEAALAAIEHERTFPAVFVYPTKALARDQAERMIRYGYDVVIADGDHPGWRARIQEAEIVVTNPQMIWIHARRGLQFWEFLTDVARCLVWDEVHFYGPRQVNLLLGIVRALRDRRHLFMSGTVGHPDSFCGEVERATGETCTHVRGRGKMAPRKFVVRNTAKMADLLEDITRYVREDSKTLVFFRTRAQAEHAYQVLCRRYGLEGYVTLHHGALPRDERRRAEREFKRGRASVMITVKTLEVGIDVGSVTRVVHYGIPDRVSDFWQREGRAGRRGQEAESVIYPADPWTSFVTRTPRRFREAYLEGKVERILAYAQSHLAAPPESNPTESFYGEKDAYRVVREDNPRAVLRDQVDPEDVPRAWAPGCAFRAAGEIWVVSGPPDRETLMIPAVPAEEYDPTVAQLIEEGWWTYPRIEVYAEGEEECGIGYVELRWTDTVLSPPPDEPERPILVEHGDITIRVKAYYIRLEDPDLRRRVGADSAEHAVHALNYALKLKHGVPLSLLNHYVHRPVESLIPEESDREAFLLIYESPPAVMPLLEWESAVEEAIILARKENPRNLRLPRCPWPKEDVVTFESLIERYLLGILQLAEKLREREGLPDGVEGRQPKCGV

SEQ ID NO: 245 - protein, 420 aa, Methanopyrus kandleri
VHLHVLVRARKDASAVESALERYYPDWEWKVETLGGERDPSWIVGLARERFEGSDALWKVLLLGRRSYPGRGRVVWMEGWSAVNVGKAEVRNARLTEIVDGIELGRAAPRLSVAFRRVPELRRGRLLTENQDADTMLRWGKFTETIAELAGEELPPGAYFSLRKPGNPPEEVLYDASGKPILRIITPDEGEPSVSVLGDGEPFDSRAFVRENRETLENLFEDAVDFLGGVAEEFDVLFVPVSGGKDSTCCLAIAVETTDRLGIDVEAVYVDTGYDLGRDVVEDVGAALGVDIKHVDVSDAFERGLRERKPTHENRWCTGVKLSGIKKVLKDLEGDVLLVVGDRDAESRRRRLRPPVHRNRLLDVPEVNPVKGWGGAEVLGTLFRLGLPVSELYEIGFYRLGCSVCPSLTAWERALMELSR

SEQ ID NO: 246 - protein, 102 aa, Methanopyrus kandleri
MAQEVRLRLSSTDHYKLEEVCERIKKVVEETGAQMSGPIPLPTKRLLVPTRKSPDGEGKATWDKWEMRIHKRLIDIKGDERTIRRLMRIHIPEEVHVEIIMK

SEQ ID NO: 247 - protein, 423 aa, Methanopyrus kandleri
VAKEKEHINLAFIGHVDHGKSTLVGRLLYDTGVIEDKDLGEGEDKFRVIMDTLEEERERGVTIDLAHTKFETDNYEFTIVDCPGHRDFVKNMITGASQADAAILVVAADDGVMPQTKEHAFLAKTLGIDQLIVAINKMDLVDYDENRYEEVKQEVAELLKTIGYNVDEIPFIPISAFEGDNVVEKSDNTPWYDGPTLLEALDNLEPPEKPTDKPLRIPIQDVYSITGVGTVPVGRVETGVLEVGDTVRFEPAYTATGGRKGEGEVRSIEMHHEEIERAEPGDNIGFNVKGVGKNDISRGDVACHPDEPATVVTPDDTFIAQIVVLQHPSAITAGYTPVFHCHTAQVACKFEELIEKIDPATGEVIEENPDFLKTGEAAKVRIRPTKPMVIEEVSFIPQLGRFAIRDMGQTVAAGMCVKIEKEE

SEQ ID NO: 248 - protein, 317 aa, Methanopyrus kandleri
LTVRAGVIGVGMMGSHHARVYHELEETELVAVCDVNERRVKEVAKKYDVNWYTDHRKMLQEEDLDGVSICVPTKYHADIAVDALEAGVHVLVEKPIADTIENARRIIDAAEDHGLKLAVGHIERFNPSVMKAKEVVSRGDLGDIVVMSAKRVGPYPPRIRDVGVIVDLAVHDIDVMRYLAETEVEEVYAAAGSAITRTQEDYAEVMLRFEGDPTGLIEVNWLTPHKERRLEVTGREAILEIQYIEQELRLMDREGVKRFNIRKEEPLKLELRDFAESILENRDPLVDGEAGLQALRTAVAALKSVKEDRPVSLEEVE

SEQ ID NO: 249 - protein, 669 aa, M. kandleri
  MISC_FEATURE (200)..(): selencysteine
  MISC_FEATURE (200)..(200): selencysteine
VGDKDDVRIGVFVCHCGVNIKASVDVEEVVEYAKKLPGVVYATDYPFFCADPGQEIIQEAIKEHDLDRVVVAACTPKIHENTFRNCVKEAGLSPYYMEMVNIREHCSFVHMQEPEKATEKAKDLIRAAVERAKRLEDVPTKEVEVENSVLIIGGGIAGIQAALDLADQGFKVYLVEKEPTIGGNMARLAKTFPTDDCAMXILAPKMVQVGNHPNIEMITYAEVKDVDGYIGNFEVTIEKKPRYVDEDACTGCGVCAEVCPIEVPNEFDLGIGTRKAIYVPFPQAMPLVYTIDMEHCIQCGLCEEACPQDPPAIDFDQEPEEIRLKVGTIIVATGYEEFDASKLEEYGYGKYDNVITTLELERMINPAGPTEGHVIRPSDGKEPHRIVFIHCVGSRCPGKEEKGEAYCSRICCMFILKNAQLIKQHEPDAEVYCCYMDVRAFGKGYEEYYERAQKQFGVRFIRGRPAEIVEDPETKNLIVRVEDTLTGEPMEIEADLVVLGCGLVAPEETYSKLADILGIDRSPDGFFKELHPKLEPVSTKVRGVQIAGVAQGPKDIPDTVAQAKGAASEASIPMSQGKVEIELITATVDEDVCGGCGACAQVCPFDAIEMVEKDGKRVAEVQDVACQGCGQCAAACPSGAMQLRYYRDEQLMPQIEALLAEALEEEEEE

SEQ ID NO: 250 - protein, 249 aa, Methanopyrus kandleri
MRASAIATLLVAMVVIPIASAAELQTSATTETAPTATVKPSAGADAGSDVGVSVVGVPLTIGTDETKSTSTTGSANVTTTIPPEYYSLASGLTQSLCDALSNGVAAVIDCLRGQAYHEPRPEDIVFAVVLSAVKAVVNQKLHEESFQKPLNEFHLMLVQFIGPNATLMQLLSAVTAELQVNLKEAIKSFGPIAMLYDRVENALKSASGNEKSAYESAKSELDNMVNNLTKYASDIFCMLLSKCFPGLQL

SEQ ID NO: 251 - protein, 173 aa, Methanopyrus kandleri
MVNRPARIYREWKGPAYTRREYIKGVPDPKIQQFDMGNPAGDFDVEVSLVARERAQVTHNALEAARVAANRYLTKTVGRQNYHLKIRVYPHHVLRENPLATGAGADRVQEGMRLAFGKPIGTAARVREGQRVVTVRIDPENFEHAKEALRRAGMKFPFPFTIVVDKGEELVQD

SEQ ID NO: 252 - protein, 770 aa, Methanopyrus kandleri
VKYVRWFEEISKDDVDVAGGKGANLGEMTQAGLPVPPGFVVLSTAYDEFLERTGLKEKIKEILSSHDLSDNDELQEAAEEIQRLIVEVEMPEEIREEIVKAYRELCEKVGKEEEFVAVRSSATAEDLPEASFAGQQETFLNVQGEEDVVKYVQKCWASLFTPRAVAYREEQGFEHLDVSIAVVVQKMVDSEKSGVMFTVHPYTGERDKMVIEAVWGLGEAVVSGEVTPDTYIVDKNTFEVIEEQISEQEWMYTKDPETGETVKAEVPEDKRDARKLTDEEIKELAEIGVAVEEHYGFPQDIEWAIEDDEVYVLQSRPVTTIPEEKGGEEEIEAEELEGKILVRGLGASPGIGTGEVKIVMDVDEIDKVEEGDVLVTKMTTPDMVPAMRKASAIVTDEGGITCHAAIVSRELGIPCVVGTGNATEVLEEGQVVTVDGERGVVYEGDVRKALRAEEEEEEREEKEIVVERPAAEPVTATEIKVNVSMPEAAERAAKTGADGVGLLRIEHMILGVGVHPRKLIEEGEREKLVQVLMDGIRKVADAFYPKPVWVRTLDAPTDEFRELEGGEREPEETNPMLGWRGIRRDLEERETLECQFEAIRRLHQEGYDNIGVMIPLVQHPEELRRAKRIAKEVGLKPHRQVEFGMMVETPAAAVLIDEFIEVGLDFVSLGTNDLTQYTLAVDRNNDKVAYLYDEKHPAVLRLIKHVINECKEAGVKTSICGQAGSDPKMAEILVKAGIDSISANIDAVPQIRRIVARVERKILLDKMREF

SEQ ID NO: 253 - protein, 241 aa, Methanopyrus kandleri
VSLLKHLSELGLSEREARVYLYLVRAGEANAREVSEGVEIPYSKVYSVLRSLEDKGWVEADRSARPTTYRPVSPDVAVKRALEQELNRIRRELEEHAKVAVRKLSEIYRAERETVARTYHGKSARETLAEVLRSSEDIACIVHLGRNLPRWLLESLRRMEGLMILRAKEGSEVADELEPDVKAPIDIEPRNTLIVLSADRREFFLGKFGEGDYLLSLEEPILAQGIHDAVTRACKSRSRHA

SEQ ID NO: 254 - protein, 171 aa, Methanopyrus kandleri
LESKHLRFLRVLEEVVSDLPERVLRRLCRLHDIRGHRGDTRLEHSLKVAYLCWRLSGKFRVDGKIALESGLLHDIGYGIPRCPLCKLDPGGHCGICHWRTGSELLEEVNVDPAVVRAVRRHMFPYGPPPRTPLDWCVWTSDKLESVLSFLGFRVLPDPVLKRAVSAIYTLS

SEQ ID NO: 255 - protein, 94 aa, Methanopyrus kandleri
VIVVSKVLVDLKVLPESADVDYEELKEAIREKLESMDVVDIEGMEEEPIAFGLKAIRVKVVVPDAEGGTDALEDALKEVDEVNQVEVVSASRTL

SEQ ID NO: 256 - protein, 64 aa, Methanopyrus kandleri
MTEAGRIERADYAVCSACGGPIAPGERAVSHPCPKCGEVVITRCQKCRRLGNRYQCPNCGFIGP

SEQ ID NO: 257 - protein, 77 aa, Methanopyrus kandleri
MVEYDEELDVRGKICPMPVLETRKKLEEMSEGEVLKVVGDYPPAKDNIRRFAEENGHEVLDVEEGEDHFVIYIKKKG

SEQ ID NO: 258 - protein, 421 aa, Methanopyrus kandleri
LDIREIWKELGIDLERHDELLEALPEVYEEIFLSQENRPERMSYFDEVVADIHGARVRELYEMRQEGKPILGTFCVYVPEEIVLAAGGVCVGLCGGAEFPIPDAEKYLPRDLCPLIKSSFGFLVSRLCPYCQVATVIVGENTCDGKKKMYEIMSEHKDVYVMEMPQVKDEEGLEYWHEQLIKFKEFVEELSGNEITYESLLDAIERVNAKREAFRKLYELRKHDPAPISGRDANLIAQIAFYDDVDRFTEKVNELNEELEKRVEEGEGVAEEAPRILVAGTPMPIPHWKLLYVVESCGAVVVCEESCTGTRYFEREVSTEGDDVEDLIKNIAEAYMETKCAIFTPNDERVKDIIKKYKEWNCDGVILYNLKFCQPYAVEHSKIESRLREEGIPALKLESDYSEEDVEQLKTRIETFLESIA

SEQ ID NO: 259 - protein, 434 aa, Methanopyrus kandleri
LGRKVIKDVVCPFCGTLCDDLEVVVEDGEIVEVRHACRIGAAKFLTAQEDHRHTEPMIKENGEWKKIDYEDAAEETARILVEAKWPLMYGWSSTLCEAHEVGIEIAEKVGAVIDNTASVCHGPSTLGLQDAGVPSCTLGEVKNRADVIIYWGCNPMHAHPRHMSRYTAFTRGFFRPKGREDRTIIVVDPRRTATAELADVHLQVRPNEDYELISALRAAVHGIEIEREEVAGIPVEAVHEVADLIKEASFGTLFWGMGITMSRGRHRNIDNAICLIRDLNEYAKWTLIMMRGHYNVTGFNEVLTWTTGYPFAVDFSRGYPRYNPGEFSAVDVLIRGEVDAAFVIASDPGAHFPRKAVEHMARIPLVCVDPHWTPTAELADLYVPVTIAGIEWEGTAYRMDSVPIRMRKVVEPPESMLNDVEFLEMVIEKVEEMV

SEQ ID NO: 260 - protein, 251 aa, Methanopyrus kandleri
VRVLGVDAGSSHLKCAIVEDGSLEDHTVVESTGPVKKVLRRALDELGAGIDEFDVTAVTGYGREALSDEFDETVPELPAVALGASQLVEGARTVIDVGGQDTKVMKVEDGKVVDFQVNDKCAAGTGRFVENVCRRLGIEMSEVDEHASGADDPVKINSMCAVFAETEVISLVNRGIDVERILLGVLDSVAERVATMIDKVSPEPEVVLVGGMARCRVFAELLSDRLEMGINVPNEAHVAGAFGAALWVLEK

SEQ ID NO: 261 - protein, 153 aa, Methanopyrus kandleri
MARVSPLVTGLVAGVSAAILQAVFKVSPPPAYGICIACHTRDLVNWIVNHAAGTTLGMAPVSKPFPVLTVVGIFIGALIAAFAHGEFRIRRTHHPILGFVLGFLVINFALFMGGCPIRTSLRTMYGDVVALLGLISIAVGVILGAEFYLKRKA

SEQ ID NO: 262 - protein, 157 aa, Methanopyrus kandleri
VAEYLHAIGTLAFGVLIGYLGQRSAMCFIGGIRDVYLLRDTWLVQGLIGFLIGAFFGLVVFGAAGMIKKFPWFLYKGASAIPGDVLGKKPGFAAHAAVTVIGGLGVGFLSVVQGGCPFRNYVMAAEGNVTAMAYLLGVFVGAVFFHACIVPIFGPPK

SEQ ID NO: 263 - protein, 192 aa, Methanopyrus kandleri
MEMGLLSRLRSAFSRDEGPSDEREGKGLIVFESARDAMKAERTLKEAGYDVRAVAPPPEIREGCDLAIEYDLVDEVGVRRTLEEIGVEPLKFVSLEDPSLKPIELVRVKEVDGYIMVRCGNMKVTVDRDGTIVNVSGGGCPDVPYLAHELVGKNVLELSENSMPASLGYTLCAYTLDKAVRKAKEVLLGEGS

SEQ ID NO: 264 - protein, 233 aa, Methanopyrus kandleri
LAAAAARVLEFLGEDEPRLITAGDLGEGDGSLEIYRRLREVDDDVLVIHYIKPKIDEIRRVDTSGKVIADAGGMYAAKAAGIGPEFHLFLPDPGELAFLADEKAHHPAYVRGFIAEVDEEEVPSLVRRAYEEDQVPDYMVVKGRRDHVVHRGEVVETVDEPLVEAMECIGGTGDTLTGIVAALIAAGFGTEEACVIGCRVNRRLGEIANATPTTRIHELTRAIPEALCEELRE

SEQ ID NO: 265 - protein, 656 aa, Methanopyrus kandleri
LAEEEPRIGVYVCHCGVNIAGVVDVKEVAEFAKTLKNVVVARDYKYVCSDPGQEIIQRDIEKYDLNRVVVAACSPRLHEPTFRRCVEEAGLNPYCFEMANIREHCSWVHMDDPARATEKAKDLVRMAVAKARLLESLETIKVDVTDRALVIGGGVSGIQAALDLADMGFEVILVEKEPSIGGRMAQLDKTFPTNDCSICILAPKMVDVSKHPNIKMYTYAEVVEVDGYVGNFTVKIEKKPRYVDEDACTGCGACAEVCPIEVPNEFDEGLGMRKAIYKPFPQAVPSVFTIDEEHCIRCGLCEEVCDADAIDFDQEPEIVEEEVGAIICAIGYDTCDPTEREEYGYGVYDNVITSIELERLINASGPTGGKVVRPSDGKKPKRIAFIQCVGSRDPHRTNPYCSNVCCMYAMKLAQLIREKYPETQIDIYYMDVRAFGKGYEEYYERSQKQYGIRFIRGRPAEIVEDPETKNLIVRAEDTLLGDVVEREYDLVVLSVGMVPRDSADVIQEVLSISRSPDGFFMEAHPKLRPVDTAIDGIFLAGACQGPKDIPSSVAQGSAAAARAATALAAGEVAVEPIVSEVDEEICGGCGTCVELCPYGAIELVEKDGKLVAEVTAALCKGCGTCAAACPSGAMEQNHFKTEQLYKQIEGAFRDPA

SEQ ID NO: 266 - protein, 482 aa, Methanopyrus kandleri
VRGVGTLSEMVVNVEPVTRVEGHGKIVVEFDEDGNLKDARFHVVEVRGFEKFLEGRPIEDAPILTPRICGICQVAHHLASAKAADEVFGVEPPEPARKLRELMHHAATVHSHALHFYFLAAPDLVKPEEEDPMKRHVLALARENPEVVKCAIELRKIGQTIVEAVGGKPIHPVTAVPGGVSKPLEEDRREELLELARSAVELAERTVDLAEELTRRLEEEGLLELGYLESYHMGMVSDGVHELYDGVIRVVDPEGNVDREFEPSEYLDHIAEAVRPYSYLKFPYLRDKGEEEGLYRVNTLSRLNVCDRMATPRAQGRYEELVDEYGKPCHHPMLYHYARTIELLSSAERCVELLEDDEITGDDVREEVDPDDVTGEGIGCVEAPRGTLIHHFKTDEEGLITEVNLIVATVQNNPAMDLGVKKVAEEYLRSPEDASPEVLNRMEMVIRAYDPCLSCATHVLGERPRLTLEVHRAGRLVRIVEG

SEQ ID NO: 267 - protein, 304 aa, Methanopyrus kandleri
VKGVVRLVKIATTWLCCCSGCHVSVLDLHERLLDLLGDAELVHCPVLMDTKEIPEDVDVVLIEGGIRNEENVEVAEEFRERAEIVVAVGTCACYGGVPGLANLYSNEELLRTVYVETASTENEDGVIPSEDVPELTWRVRPLSDVIDVDYELPGCPPEPDLIADAVTAILDGREPELSTTNLCEECPRKKEETVIHEIRRPVEGEPDPDRCLLEQGYPCMGPATRAGCGARCPEAGVPCAGCAGPAGEIPDQGAEMMSAIASIFRADVDDVDPSELVESVPDVVGWFYRFTLAGSLMPFRVDRE

SEQ ID NO: 268 - protein, 141 aa, Methanopyrus kandleri
MGEWKPKIIAFCCNWCSYGGADTAGVGRMQYPPSTRIIRVMCSGRIEPSLVLKAFREGADGVFVGGCHLGDCHYQSGNYKWWRRAELLKKFLAEIGIEPERFRYEWISASEGEKFAEVMTEFHQTLLELGPLELRERLKRL

SEQ ID NO: 269 - protein, 475 aa, Methanopyrus kandleri
LKALEQLSSYVAENRAGNRWDFKLAGIRVGRGRTVTFFRHILLASLACLTLPIAATCVNEEFESKVESLIQNPDFQGTKEITLYASGSYVMTGRIKVSYRGPEEVEPVEVDKLINGLKELREDLDPLAGQNEPIKDLLGALKKFDDTSDVLEKLKEKTQGLKLAACEIDVDLWYVGETGTPPSDLPQILQQLRTEGELHLSYKIPYPEAHVYVVGSVELLDRALNLPIRAVFSYDYPNDGSGVKVSVDTEHRKFTIETTDNIYNLIVVELTLHGGLQEVEKLADLSVESSEDLQKLLENTEVKVECYPRGGRTAEINGLPLMVDEGAAIVVYAVGSNPINSIVASKIAELMGKNPLVVTLGNADLQVGTDGKTLVIKGSAPGGLVVIYGPAGPDNTLDVTSRVGTLQVARALGAQVPPLVSLFGWILGPLLGSITTTYTPAFSGELRMSPRGIGMATPAVIAALLLGVHGRRRSK

SEQ ID NO: 270 - protein, 146 aa, Methanopyrus kandleri
VILKFDHWSGPLYLHCSIRRGDPRRIIERSSTGVIIQAISTEYADYRVIASAACRAIRAFESDRNLARSLDLEFLVRLTGTRQIREAIDRAEPGDEFVLVVASRDRKKVRGVLKELEEEAEELEEFPERDGYKELLRTAASVDAEE

SEQ ID NO: 271 - protein, 524 aa, Methanopyrus kandleri
VDPRELAERLTERDLRILIHLAESGEATPEELAESLDVDLGPVMRSLYWLEERGLIESEEETHEVYELGDEGKEYAEEGLPELRIVEVLRKIGGEGRLEEVLDRAGVPRKLAGPVLGWLRRKGLAEIKREDGETSLVLLEEEPEDVDQSVLEALAAEGSASVEELARKLEMDEEEVEKALKRLSERGDVLRAREETVKKVRLTERGEEVAEHAPEVLERDWITELKPEHLREGTWKEKEFKPYDVKAPTSPTFPGKRHPLKEVINEIRRIFLEMGFVEVSGPLVESSFWNFDALFQPQDHAAREMQDTFYLKEPAEAELPDEEVVEKVRAVHEDGGDTGSRGWGYEWDEGVARKTVLRTHTTAVSVRKLYEVEGPPLKAFSIGRVYRRETVDYKHLPEFHQCEGIVLAKDVSFRDLLGILEEFYRRMGFEEVRFRPAYFPYTVLSVEPEVYFEEKGDWVELGGAGIFRPEVLQPLGFDPDVVCLAWGLGVERLAMLKLGIDDIRDLYMSDLKTLLELPTARARR

SEQ ID NO: 272 - protein, 178 aa, Methanopyrus kandleri
VFSGIREGAVQVPKWILDVLTGKKLRVHELRAPVWVGHRELMLLSMDVRDDENPLSLTAGVLGLFSAALADVFTWSRGSELSYPLTSANGDAWRVCVDAAVLAVIDAFSSELEVSVEAFVSEAGIPWLATLANNGFRPESVIRGTDEVFVATLLNLLKYEVKHRCGDRWRDVWRRLDR

SEQ ID NO: 273 - protein, 96 aa, Methanopyrus kandleri
LESPVKEHREGTLIRVRVNPDADTTDLKGVDEWRGVLEVDVAAPPVKGKANRELLEFLGRKLNTTCELVSGEKSREKLVLARDVSVDEVKERLGLR

SEQ ID NO: 274 - protein, 272 aa, Methanopyrus kandleri
VKPPPEEAWIGRPVRPAQGFHTRVSMIAGVMLGGPADVEFPRMAHPLELPHYLEIDGDTWRRLRCRLESLEDRSPDLGDAVREYIREAFRCITKPDFATALKACTPVIALDTPLWRDARSVVRAIARLLTRVTGVEVQPPPDIAVELRATLYPIAERALVSTLLAQAVAHRIRSLGLRSEYLSAYLDAPSGESPPRELGDVSDLYATLVKDFDGYLARVLRLNRYVTVTAGRRFVLTPDDYDPTWRGYLQGLRRFWENRRGMEEIIRQWGLA

SEQ ID NO: 275 - protein, 509 aa, Methanopyrus kandleri
LREANADADPPDEVRIFDTTLRDGEQTPGVALTPEEKLRIARKLDEIGVDTIEAGFAAASEGELKAIRRIAREELDAEVCSMARMVKGDVDAAVEAEADAVHIVVPTSEVHVKKKLRMDREEVLERAREVVEYARDHGLTVEISTEDGTRTELEYLYEVFDACLEAGAERLGYNDTVGVMAPEGMFLAVKKLRERVGEDVILSVHCHDDFGMATANTVAAVRAGARQVHVTVNGIGERAGNAALEEVVVVLEELYGVDTGIRTERLTELSKLVERLTGVRVPPNKAVVGENAFTHESGIHADGILKDESTYEPIPPEKVGHERRFVLGKHVGTSVIRKKLKQMGVDVDDEQLLEILRRLKRLGDRGKRITEADLRAIAEDVLGRPAERDIEVEDFTTVTGKRTIPTASIVVKIDGTRKEAASTGVGPVDATIKALERALKDQGIDFELVEYRAEALTGGTDAITHVDVKLRDPETGDIVHSGSSREDIVVASLEAFIDGINSLMARKRS

SEQ ID NO: 276 - protein, 270 aa, Methanopyrus kandleri
VTHVVLVVGLLETDSGKTTAALPLVSALDLVPFKPRSGHNVWLHYDHTRRCVELGLPVSRDVLKLAKVAEVDLPLITLNPVHRVWTSPDVGTAVKSDVSLRYFSAQTDAYVLMDRLDETVFLYTEGTELRYVPDETMEMARECEVREVREEPAPEELRRTIDRAWSRVRKEGPVLVESLNNLAVPWPGVLKYDGVAVAVGPGTALVYDLRDYARAAETLAGPEAVTLSLLEVLEPLEVVRLPPLDRTRRSDPRKLEEAYRELIGAVQERL

SEQ ID NO: 277 - protein, 243 aa, Methanopyrus kandleri
MLEWRPEPGYDPLETAERVRGWVCEGRRRKYYRFRETRFYGGCATADAVGCNLDCAYCYVNYPRRHPWDRRWKFHRPIDVVERLKNMGGDVVRVSGCEPTLCKEHILELIELCGRELPDRKFVLETNGTILGADRSFVRELGNHEHVHVRVCLKGYDPQSFARITNANPDGFDLQLRCLRYLFKEGISFHPAIPRLFRPEDIDKLAGVLSDIGVPPSSLEVEPIRVYDHVRRELRRRGLTVVR

SEQ ID NO: 278 - protein, 670 aa, Methanopyrus kandleri
LCGDPGLLTLVLLILLLAVASLPAGSVVLASALAPVAVVGGLALEYGLVDPRTVPVFGLLAVPGLILGLRTARKYPKQHLRHRLIIAVIITVTFFLSNLTIYVFKGTVSFVAGGDVPRHASLALSFLTTGKPPVFYDTLRREYRPVHYPSGLGHAAITESIVSLLFHPKDLREAASWRVQYGSTIIELVEYHVSTAMIASAIIDIILLTLGRLPILVATLVACAIYLTYPGPVPFFQSLAMLSASIVAIILNSRWISTFLILSAVVIHFYSVVVMSLLIPVLIQTRKQSTISLLLGMATGIIIQFPYVHWSAAVHFPRYPAHPNHLPPDRELGPIVYIIQFMFTAFAAYPPFIFPNASDMLYTIPFIAAVMLILIRIRKLLPQDLKIIWIMYITTIVILGVTFGRFIGKRFLFTAPLLTTLTLGFAAANYHLLALSILISYCALTTDWWYIYFINTPPIDVLEKHWKLFYNSFCKGETIATVSIGLLPFTSTWKPQKVAQVVRTFPEPGLPILVTEEENNLTLRLLPLTQVKGKYIVEKLPPTKRVWSVDDRAGSFRRNVLVAAERYDSHVLTYVAIMSYGSVPTVLVIKGKTWGASMAFMTLMEPTDDLSVFIRTRHVPNGYLVRISDWQGVRVMKITISGARWVGDKLVFHGSLRDLIANIRVTGDLV

SEQ ID NO: 279 - protein, 679 aa, Methanopyrus kandleri
LSDPGLFMLILLVLLLAVASLPAGSVVLASALAPVAVVGGLALEYGLVDPRIVPAFGLLAVPGLILGLRTARKYPKQHLRHRLTIAVILLTAYLSVDLTLYAFKGNIGATMGDPSRHASYALTLLTAGEPPVFYDTLRQEYRPVHYPSGLGHIAITESIVSCLYHPKDVQEAASWQVQFGSVFLELLEHHLDAALITSSIVDLLLIARGRLPIYIIPPLAYITYLTCTAQYAEFIPFFQSLAMLAASAVALILNSRLLSGLLALGAIAIHAYGVIIVTTLILALLWAKKTRITTVTPILLGTIIGAIMQYPYVHWSVMTYFPRYPAHPNHLPPDRILSPVACLLQFFFTAFAAYPMILFPTTNSLPYVLPFTVINVLIIIKVRKLLPSVLRVMWITCIVTILALAVVSGSIVGGRLLVVVPLLTAMSLVLPAANRNLLALGALFGYCALTIHWWLAIIIHGNEGISTLPVWVLKEHWNIFYKSLCNKDVIATLPEGLLPFTCTWKPREVAYVVRTFPEPYTSILLTAKEGSEILLYAPPVRAERGYIVKKLPPPGRVWVAGNRAGSLRCNVLIGAERYNRQVIIHVNVVNYSWVPIPTINIKGKLRKRAIVLSTPKSSTLPAINVHRIPEGFLVRISYSHGVRVVKITISGARWVGDKLVFHGSLRDLIANIRVTGDLV

SEQ ID NO: 280 - protein, 430 aa, Methanopyrus kandleri
LGYEDEFPESLELFKRAERVMPGGVSSPVRRFDPYPFYVERAEGSRLYTVDGHVLIDYCLAFGPLILGHAHPEVVEAVVERVREGFHYGTPTLPELKLAEKVVELVPNVEKVRLVNTGTEATMSAIRLARAYTGREKIVKFEGCYHGAHDAVLVRAGSGASELGAPDSPGIPESVAENTLVCPFNDVEAFVETVERFDEEIGAVIVEPVLGNAGCVPPDEEFLKVLREYCDGTERLLIFDEVITGFRLELGGAQEYYGIDADLVCLGKILGGGLPIGAFGGPEEYMSRVAPEGKVYQAGTFNGNPVSATAGLVTLEVLERERPYDELSSKAERLASALEDGLEDRGIEGVVNRVESMFQVYFGIEEVRDYADVNSADHDAFKRFHRELLEHGVWIAASNYEAWFLSIAHTETDLERTEEAFEEALDRLTG

SEQ ID NO: 281 - protein, 141 aa, Methanopyrus kandleri
VSEIRLGLVVTEFNREITYAMEELAVQHAKDLGAKVVERVLVPGSFEVPLAVRKLLERDDIDAVVTLGAIIKGDTDHDQAIAQQAFRKIQDLMVEYGKPVALGISGPGMTRMEALERVHYAKRAVEAAVKMVRRLRELEGE

SEQ ID NO: 282 - protein, 226 aa, Methanopyrus kandleri
LAEDDKVFRRARERLVERLKSLGYIRSNRVAEAMLKVPRHEFVPEDLRDRAYVDSPLPIGRGQTISAPHMVAIMTELLDPRPGHKVLEVGAGSGYHAAVVAELVKPDGRVITVERIPELADFARNNLKKTGYDRFVKVLVGDGTKGYPPEAPYDRILVTAGAPDVPESLLEQLKPGGKMVIPVGDRHMQELWLVEKTEDGEIRRRRHGGCAFVPLIGEEGFQEPES

SEQ ID NO: 283 - protein, 113 aa, Methanopyrus kandleri
VIEIMTREEFFDLITEGLKTAEIRPSDHRSFRYLEPGDTLVFKNFKAGTMRCIETVVRNVEKDLDPKEAAERFYQEAGFESPEECLEGLKEMYDGLPEKVDVAEFEPVREWEE

SEQ ID NO: 284 - protein, 256 aa, Methanopyrus kandleri
VFFAGTGGGRFAMITQKRRTGGFRLEFPDFHLHVDPGPGCLLSTRLSRRPTTAVDAVFVSHSHPDHYAEAEVLVEAMTRGGTKRRGTFVGSVSAVEGYSDDSGDYGPVLSAYHRSLPEEVVALEPGDEIDLPAGTLEAVPTTHGDPTGIGFRLETEDDSIYYTGDTELREDFFEVIEDVTVAIVNVVRPGSDRIRGHLCTYDVIELVSEAPELRKVFITHFGMKMLRVGPGREARRIEHETGVETVAARDGRAYDL

SEQ ID NO: 285 - protein, 322 aa, Methanopyrus kandleri
LTLVLAYAGTDGALVAGDRRTLVARMDEEKMRKVEEKLYSGEIRTEEELESFLKDLDVEDGYFEFHDDRKKVWKVNDEVVAGEVGVRSAKGVRRRRVYATPGAHAIVELEGEKVLSKNFGGPALIVEGPKVVKELVIEFVNSELGGKPDLESLRNALDDLFEYVSSGTILVSSEYDAYEVKGKADPLARARLQKAIDEDIERLREHRRRLAEEMLKHIREGYDILKEGVVGEVVEVGTEEEGKGVEDVPPERRIVVRLAEDVDARHMGDVVAGPGEEIVMAVEGNPEEVEPGDRVVVKDGVMKIDGKDLPVITGYSICRTRR

SEQ ID NO: 286 - protein, 346 aa, Methanopyrus kandleri
MTCELCGDPASSFLRVCRECILNRWDKAREILREAHAEARRELGLPPEPPSEGLECGACVNRCRIPEGKVGYCGVVRNEGGKIIREHAGRAYLDPHPTNCVGAWVCPGATSRGYPKYTETRGPERGRYNLAVFYGGCTHHCFFCQNYEHWVERERLSAEDLKRRASDPDVTCVCFFGGDPTPHYDQVIEIGREWEELRVRVCLETNGSLRPKLMRRIAEICYESGGGFNMDVKAYDPRIYYALSFSDPEYTFKNLEIIGREFAREDPPILRPSTLVVPEYITPEEVEKIAEFLASIDERIPYRLLQHVPQYHSADLGYTPVCVMRECKRAAERHLENVDACIYRYA

SEQ ID NO: 287 - protein, 87 aa, Methanopyrus kandleri
LPSEEEVLKELKKVKDPHTGLDIVSMRLVEEVNADEENIEVVVRPTNPFCPSALMIVEQVKATLESAFEGVNVDVKLVGHVLTEEEE

SEQ ID NO: 288 - protein, 128 aa, Methanopyrus kandleri
LIAQVIASTTDASLVEILSGNERLDAELAFLGTPVHAFRPAEPVRHFVRNNDWSDVKVALFCTYSLHPGKTIRWMREKIERAGGEVIGELTVKGEHPFLPLIARGHPDERDVQKARKFAKEVLRKARG

SEQ ID NO: 289 - protein, 358 aa, Methanopyrus kandleri
LNATLRIRNRPVAESTYTSLRGAKAEVVRVEREEREIHPKPPFETGTMLQAATRRLRLSSERVMQLAQDLFEGGLITYHRTDSTRVSEEGKRVARDYIRANFDPEDYNPRTWEPEAEHVEGAHECIRPTRPADAEELRTMVREGAIQTTVTLTSHHLRLYDLVFRRFVASQMKPAKVLYQEAVLEVEVKGVPVAELELSGVLEIVEPGFTKVLTEYDLPAYGIRETPELEEGDRLEIGDVEVLERHEEYPYDQSELVEDMRERGLGRPSTYAQIVEKLFRRGYVYEVPQRRWIFPTTRGEAVYEYLSTHYERFVSEETTRDLEERMDAVALGKAEYQEEMEKLYLELERVVEMPDPEP

SEQ ID NO: 290 - protein, 73 aa, Methanopyrus kandleri
VMNVGAREHHIDGNTVKFFGIERWDGHAPEVPVPVVAAFTAPGGSVDNVEEVGKEVLSKGQRYPRSTARALGY

SEQ ID NO: 291 - protein, 193 aa, Methanopyrus kandleri
LTVLSDRDIKRALEEGDIVVKPLEEEYLEEALGPASLDLRLGNEFVVFKTLHKPCIDPTVDAGENTERIVIDEDEEFVINPGELVLAVTHEWIEINAPDITGVLHGRSSLGRLGIQAHVEAGYVDPGWRGRLTLELVNFNPMPVKLRPGMRVVQIVFHRLSSPAERTYAESSGKYHGDERPSPSKMHLDFCRG

SEQ ID NO: 292 - protein, 290 aa, Methanopyrus kandleri
LDLRIAHVSDLHLDESRDKSVLEAAIERVKELHPDVVVVSGDIVKGWRPRHYGETERIFRALDVGKLLAVVPDNHDEMRGGEVVFRKHPYFRRKYREFTVKSPSFGELLMYPIILEGDGLCVIALDSTEADRSDGEVGLDQLLRAEELIREIEPEFIVLTMHHHVTPFPGLIDVSTVLDAGNLREFCVANGVDLVLVGHKHIPRVDYFASKEGGCAVSHAGTLCPEVARYVPPAFNVVDVERGEVVVQVLEYREGEFSEPKLMGRFRIEGEHLRPVELGYDPSKAWMRGY

SEQ ID NO: 293 - protein, 176 aa, Methanopyrus kandleri
MGLDYEPSHLMFLVTVLDDRDGEVLGDAIQKLIEREEVLACHAVPCVTKKNRPGHVLVVLVDGGEDPDRVAEDVARDIMVLTGSTGVDRFDADGVYSVPSRFEDVRVVYGEREWRVSVKIAETEEGEVVTVKAEFDECREIGEETGIPPREVKAMVEAAARVGGWVDLKEREIKVQ

SEQ ID NO: 294 - protein, 420 aa, Methanopyrus kandleri
MDEYLRFLQMLVLSAAVGMVVGLEREHAHIARRIAGFRTFTLIGVLGGLTAYFYELGCVPIATVTSVGAAALAVTMYVMRVYQRRLLGIVTPLALLATFAAGALVGMERFKEGATLAIATAVVLLSRARIHPVLRRLSDRDVLDALTVFSLAALVYPLCPPGPVDPWGVLNLRRVLEIVLLVLAVTALGYLGVRMSVRGGVLTTSLVGGFVSSSATTATVVARFRELPWVPAAVVPAATSVAIIRNMILVAAVSRNLAVVKKVACVAIPAAIAGFAVAVYESGRAEVDEEDLRRVVRGRMRSPLSLKPAVKLGLLISGFSMTLKIGQLFAGKAGLVVGAVVGSLASSNAMSLSLAYMVNSGTLSSSTAGILIALSSLESILVKYLWTAVFGKREVLERTWRTLLPPTIAGIAGFGVVLAG

SEQ ID NO: 295 - protein, 449 aa, Methanopyrus kandleri
LTEFWARCYALAAKSLIEVMRTKSYPIQYVLRKTLSEYDDKTQSVTRSMVYDVLRRYGTLERVVEDVSRSELPPLERALVMVAANEVLYEGKHPAPVTDSATRAAKELGLNHRRVHGVVADLEEYERPEPEDEIDRLCLEYHHPRWFVEKFGALLDEDELKELMEVHNEPPEYYTFRVNTTAADVEDVLREFEEHGFEVERGEYVDYCIRVKKGQPLRLEELECWREGHIVPQDEAAALVTEILNPQPGERIADLCAAPGGKTTHIAQLTEDEAEILAVDVSRVRLRRLERFAERMVFENIEVLRADVRRLGRNPRYVGKFDRVLLDPPCSSLGTLRSDPDVKWKIGPRDIRELALKQRQLIRAAARLLKPGGVLVYSTCTITPEENELVVSEAIKRDRLRPVDVRSEFEFLHPPLRVDGVSSSLEAGRMWPHVHGTTGFFVAKLKKLT

SEQ ID NO: 296 - protein, 144 aa, Methanopyrus kandleri
LRSVAVAGDLDRFGEVVEERGWPEYSPNPATGLLTELVERFLTKFPGAVAVKGPDRERGTEEFVVEIPGGDAFLDEILEECERIRRRFEREFKGEVTISLGVGVGPAPSDRRSFREAESPAVRRALEALREAKRRGGNTIVVRG

SEQ ID NO: 297 - protein, 522 aa, Methanopyrus kandleri
VAKILVTDPIHEDALRKLEELGEVVVLEDADEEEIREHVRDADAWVVRSGTRVTRELIEEAKNLKVIARAGVGVDNIDVKAATERGIIVVNAPESSSISVAEHTMGLILALARKIPQADRSVRRGEWDRKRFMGVELAGKTLGLIGLGRIGQQVAKRAKAFEMEVTAYDPYIPEKVAEELGVELVDELEELLERADVVSIHVPLTEETEGMIGEEELKRMKSSAFLVNCARGKIVDEEALIKALKEGWIAGAALDVFAEEPPGEDHPLYELDNVVLTPHIGGSTGEAQRAAGLIVAREIERVLKGEIPENVVNLPLAGVPDDVRELMEVGERLADAAAQVLEERLRWVQVKVGGELEDREKEALKRAVLKGCLDRVLTEPVTMVNAVDVAERRGIEFEFTVSDELEGGEVEVVVRSDEDEISLRGELVEDRVYLTSVNGYEVRFKLSGPTLFVWHVDRPGVIGEVGIILGEHRVNVAAMEVGRRERGGEAIMVIRMDEEPPEECLRAIDEVEPVRRVELVRC

SEQ ID NO: 298 - protein, 205 aa, Methanopyrus kandleri
LIESHVPIPSDPVERIRALRVLREVHRRKRKPSLEVTYRTVSGSTCGPYYVARWRRDSKFKHGRTLYLGKPENESVRFVEWLVSLDRNEVLELARHLMRNLRSVLKTLLTGVSDLPYKRARRVLARGLALTFDARPSESPRIRDVLEELPDRLESFAIRTLGGWPAHYSAHLRKVIRHRRKSLDGKHEIPDVKLELERWKLRHVQ

SEQ ID NO: 299 - protein, 345 aa, Methanopyrus kandleri
LLPYLVLGLVLALTPASGEPLIQGSLSKDLEFLHEYFQKRVLPKWKDDPHVIVDVVQYSESAGYVIYLPKENLFAFSRVQESVEPGRVRVVLPLTCGRPVAVEERLEGPAVIASVNQCPLTEGSSANLGLDVVVGDHVCSFGYVTNVPALGAPARCEYVLTLSAGGRVVDEEGLGSFDPVDVEYEVYSDRVVMRILGFPEGVEDLALVIDATFDLRKGRILVDRRESTDSELVSKLRELRARWGTPPGEGIEGFSGDLLRTRSGAEPLWVGFQLSHDDPLVRFVEKVIGMYSQGASEKELQKVMGEHPNVEFLFPERNGESGTSKIPFWVLPLLPVPLAGRRNDA

SEQ ID NO: 300 - protein, 273 aa, Methanopyrus kandleri
VLGPLIALVSVVPTGAAADHVTDVTSKVNVDGDYEACKDLLVGVEVYDDQGYVIASCCWDGRCDALGETKVSENHLSRTVDRFIVKMTVRYKNQLLLDERVFIRVIPGQGVIIEFNGRTIELRSANGTWGPEEPLRVVRTIDGKTVGITFRPSAKVEHAEQLSNQWVVDFLYSIDGDVIVHDKKGDYHITFQAHVKHTPLKNAEHDYMQTCPYGKKKTVDEELTHGTFGHLVDDHATKIEDLTRAWANEKMPVNPLLPALAAVLSLLGIRREY

SEQ ID NO: 301 - protein, 130 aa, Methanopyrus kandleri
VESVYTFTLSLFGCLDVTSVVGPRLMKDYGKNLAGESFLNRCWNPGCSSTARRGVQVGGSGRRARGVVSSDPPQGRSRGRRARSRLPTNQNGIDHPRHFSEVARELRGESLALKRRTPFDFEFDVLECRG

SEQ ID NO: 302 - protein, 353 aa, Methanopyrus kandleri
MVPAPLALVLSTLLTVQPANSLQWKDCPWIQLGRLSCATQGLAVDYPYDLAGDHLLLVSPLWPEGDHYRVILAAYGVEELPLPLGTRVHRVFVPSEVRRVPWKLWEQIPESPRPATFGPWSEVRYSLREWGCPQGYVFDPDEWDWSELQSSLELAVLLEPERTVDGVFAVEASLPVREDRIGKERWIRLALTPGRWLVLLGWTEDFDVRTPCRTLFRGGAPYDEAEYGLDGVKLRFWVAEYLLDLGGRARIPPSEYYSSVAGLFDFLNELPGGWEFRPGLQHEHRLYYGYGVLLEVRADRSLIVEFKAPEAGKRFRSADTVDQWFLSSRYIARHSHLLEPLRKILRGSRPDGT

SEQ ID NO: 303 - protein, 313 aa, Methanopyrus kandleri
VSMLNAEPKWFQWVEGCDWAKYLATRDTPIVDWTGELIGENWRANWVRAAKYILYCAPYKGDSVEKVRQAWYGSITLEGHVPDKGAPAKFGEVDWSDKRPDMRYIGLAFDYFDPVFDFLHVPEDLRRTMRRLAELMVGLGKVSEREYAESILKDEYMPPRSGEPSRSREYEIRNGQYWLPGEWCWITLNGTSLYGKVAKSPAQPFPNAGEAERKLMNNNPMFQAAVRLAYWVATHIPFIGWFNWFPLAGYCGHLSPMYYEGPAAPLLFPDEGWVCTDHAVLTVALYRAAGIPGYVGGELEPFGDHSWTAVRRR

SEQ ID NO: 304 - protein, 200 aa, Methanopyrus kandleri
LEITHGRPYDEGSGWHEIFIDPTGPMMHKPWKIRDSVVLVPKHKPMNDDEYACASSQRPYDMLSEAVRDAISRFVSPETMERLKIAWDGLKGLSIGLMMERFIYTNFLTAQGVSKLIDKLFFGGNLEFEIGNWFDRVRRFPGWDASEDGVERRWRAFKSEWARWRVKEREPKKSPTIWVIILAGSLAPLAWFRGARGVIR

SEQ ID NO: 305 - protein, 346 aa, Methanopyrus kandleri
VEAPWVMDPELYQSHTVQFEGSGIPPARPSDPNAFQADRFLLVAPLWNEEGRHRVIIGAYRTETVPLPEDAKVCRVLVPDRVEVVETDNPFSDERGDPAWGILSAPRHFKKPVPTGPWHEVKYTLEEHDGILLIRPERTADDIFAAEADLPTRDGWVRIALTPGNWLVLLGWSKEFNLLTVDGKTVFRGRVPYNEVKYDLDGVSMVFWYCGYAIDLKGYKWFKDVFNSGTSRECWLMLHYIDNLVSSKSNKASTDILNFHPLLQYKIGILYGPGIILRINTRNPIIIEFKAPKPRDYIKYGYKEFYSDKYWSNSLSPLEVIVSQILYGVICPVITPPILLIHRRRR

SEQ ID NO: 306 - protein, 174 aa, Methanopyrus kandleri
MDGSSGLSMCFHLVHEIGRKLDDVEDIVDDAIRLCDEFLQDKLDVDEFKKRLDDMLTRGGGIVGNSGDVKDAAYSIEQAVEATVARVSDLLEKWSREDESKARYERLKDKLEGLRGWVFGGLALSLLAGVLVQLAPQEAKTTLLQALSAITQVLAVVLQLVQVLHGLLPVPISA

SEQ ID NO: 307 - protein, 357 aa, Methanopyrus kandleri
MAEVRLEPVKEVSPPLLRVVRKGVEERELVINTSKCAACGICEAACPVGAISVAPPSAVVRKGEDPIDVDESKCVLCGICAFVCPYDVIQLLVNGKPMTEAGLPNLPKSVEVDEEECVYCSLCADTCPQEAITVEREVPTPGDLVMGEIEIDEEKCIYCKACEEACPADAITVERPKPSAADPEPEFTIEVDEDKCVYCGVCMRTCPVDAIKVGCMVCYGTTRGEIPAKGEVDGSVDVDPSSCVYCGWCGFVCPVDAIEVIKPYEGTLEVDDEECVGCGLCVEVCPCGALEFEKGGKAGKTKIVAHPETCAYCGACARACPVNAITVVREGVTAMPELPTKAWKKALDRVLGPVEKE

SEQ ID NO: 308 - protein, 238 aa, Methanopyrus kandleri
LTEASFDGKYVKRVFGVPDEVVDGAVVRAWDIIRERRSKGRVRIRRPDEVWPIGRAVARLASVARVSVRRVKGVECPEDALDQVLGDAEPSSPALRTLRSLTRGRCTIGFPVLTPELTLVVWGANTEELSSSVLDLTHHPAVRTLVSLAVLDDVGEYLVDRYDDRAEQLSEALQRAYDGRGARLLGLCLCAWLSEKLGGEFETWWNEGGGWRALYSVVRESELVESTVRERVGVEPGK

SEQ ID NO: 309 - protein, 321 aa, Methanopyrus kandleri
MPRARGGCGLPSREPAAPFLVGFTAYKGGTGKSTVAFNVGLEFARYYQGFDGVPRRPVVFFDLDPQGRSDEGGRTLKKMFEDGPFRLRSLHSPIPELDVQVVEYDPDEPVPVDGVNGSFGSYGLVDSDASFAPALLAVPKNIRIRRVKPLRRLLAAANELLFQYLEDRGSLDSKLREYLSSPPLGVVDTPPMNAASDTFAGILTQVDLVIPVVDPENVRQLSLFCKLYVTRLAVVNRVPPDGLTREAKFFDGVLNRILNKIPLNKDEVVKIPERPVIRFASALGIPVRARPDKRHSGYFREVARHIRADWNRRRYGSGVRI

SEQ ID NO: 310 - protein, 414 aa, Methanopyrus kandleri
LSPTSSSGSASPSAPDARPDRGFPTPFTASRPTSRPPTSPVSSTPGPPSPTAPPTTPRVTLTMTSPARHRDGLAAFMRDVLDLLVTLGVHAVATGPSGREYLRTHLHIDGDTHVHGFLTDVGFPYHTRKRREAHRLGTRLDHRIERLRAEPVSDPPEPVLRDPGLPDRQGTYLRRRGLLPIALDDHKIPLLARVLGYALGDGSLHEIDGQLRLTFAGEPEGLRDLADDLATLGVGTGLRRWDTKDMVELHVHSRAFARYLELLGMPRSPKVERVYGVPGWILRAPPGVKAEFLAGLFGADGWLTGSDGRYAIGLTQAKSAVYLGSLHLFMTEIGEMLEEVAGCRWGLNRERCYTTEDGKVRVTERLFICGREDVMRFLSDVGFAYSRAKAERTERALKALGGSVRGIRLKYREK

SEQ ID NO: 311 - protein, 47 aa, Methanopyrus kandleri
VGRAPVLVYRGAGHVALHVVRGGAAAGWGIVHAGEPVTIIPGVVAEE

SEQ ID NO: 312 - protein, 238 aa, Methanopyrus kandleri
VTTQQNGKPITLQPFTIPRLPFRARRPHRHGLRTVPHALHPARARSHARLHPRRDRGPLSGQLLIARRVLFPYPPVPTTLQAEIERPTNYRLNGKQVSFWVPAPDVKYEVRSMVKANGQLSFQHVQGVSERQGIVTVELQGDPEFVGVLLRQPPRVAYGVRDRVRLSLRGRGPAARGVKVSWRADGERTRIELSGSGRVLLGLILDGGAMDVRVDGGSVLETGPCRAGGVTRSWTWVS

SEQ ID NO: 313 - protein, 173 aa, Methanopyrus kandleri
LLLPALLTLLLLPGPVAGAPVDHAVDLPSEGSVSGGDLDRECVEAVLDSCSSVRWCVVRAPGVEEGAVFERCGERWVEVGSGDCPGRCGVLLRGLDAARVSWASGTLRVSGPVGASAWLLVPDPRGLRVGGTFLQGGAYPEGAGVFRDRRVSVRRGRSRCPGRCRLGWLASRW

SEQ ID NO: 314 - protein, 335 aa, Methanopyrus kandleri
  MISC_FEATURE (200)..(200): selencysteine
LYGVHSTFEDVAKAAIPKFRTTPGRLLFAGFMAGAFIAFGFTLATVAACVAKCPPYVMGGTFNKPLFKLLLGAVFPMGLIAVVIAGADLWTGNVQALSSAKGMGYADWRNVIYNWFGSYGGNFIGSIFLALMAIPLTGLFGKVGAPNLFGQTAIEIAKAKVAKDPISLFFLGIGCNWLVNLAVWQAARVKDGAGKILAIXFPIFAFVAIGYEHAIANMWVIPTGIIASHYKITWSQFFHNLMPVTLGNAVGGFLFVPFYYWYLSHPELSTKRVYKELLDFVAVTILFFILATLIPAGIAYGLDAALHKASMYVVPTVLSAYYVAGTFALRRLVKK

SEQ ID NO: 315 - protein, 342 aa, Methanopyrus kandleri
  MISC_FEATURE (143)..(212): selencysteine
MAMPVVLRPLDPWCGTVVDCHDESGERLTRVFVDVTDVKRSQVKRADAVIVTHPYRDHYGGVPRTGPEVVYSDEVTAALLELEGVDPGRLERVKRCFEVGVFVVETYPINHAVPEARAVLLEADARALITGDWCALGEHPPLXEQVDDEVDVLVTEFTRAASVHPDDLETAKARLQRLLELHRDERVVLLLNPVNPLVGAAAEVETVHVSRXDEHAVNVIRRAGAHPGGADVVFTDRPRYPLLLSDPRLIEERLPKEPKVVITERWFLYRSRKVMRELERSVPYYYVVSETGHATESEIRRLVEELRPRHVILRHGPLPSRAVVTGSWFGRRGSRSWTFRCG

SEQ ID NO: 316 - protein, 77 aa, Methanopyrus kandleri
LINEVYLVLDGCVKAYPSELYLTWSRGAVANLTREPIEQKPQEWSSMLRLTAAKIAPVLKLLCVVLPALLELIKQST

SEQ ID NO: 317 - protein, 125 aa, Methanopyrus kandleri
LKRSPVAELFPEAFLSELTPKEGEVVANPARQEEPVLEFEEGLRKSFEAMRECLPKDGRLTVMFTHRELRAWDTLVRALRDAGFRVNAAWPVHTEAQWSLYQRDKAAARYTLILACDPWEGDGEV

SEQ ID NO: 318 - protein, 200 aa, Methanopyrus kandleri
LGVFWTGAGGPVRVVGELVAEDLVPTEEIPKYDSERVLSKGVDRFYKLFNERQLLVHAELLGVIRELCEGLDEEYREPLTVYAMIAFDKMINYNTICSRWHYGRGAVVGIFDQHAYAWSWDHGEMGAVPGWWDFGVKGVLEAYEEFIRLLRGVKERPRVILGDARKLPTLLEEKPDTIVVDPPYYTTSSTPSSPTSSTCS

SEQ ID NO: 319 - protein, 66 aa, Methanopyrus kandleri
VQLLKGRLRSVVIKVGEEPGDREREALKRAMLKGCLDRILQEPVTMVNAVRVKDSHPPELVVVEEA

SEQ ID NO: 320 - protein, 252 aa, Methanopyrus kandleri
LPGRGCAHDEDPGHGPVHEDALRKLEELGEVVLEDADEEGLRRHVRDADAWVVRSGTQVTRELIEEAENLKVIARAGVGVDNIDVEAATERGIVVVNAPESSSISVAEHTMSLMLVLARRIPQADRSVRRGEWDRKLFMGVELAGKVLGVIELGRIGRQVAKRTKAFEMEVIAFDPYISEEVAEGLDVELVEDLDELLRRADVVTIYVPLTDETQGMIGERELKLMKESAFLINCARGEVVDEEALVRACSC

SEQ ID NO: 321 - protein, 685 aa, M. kandleri
  MISC_FEATURE: selencysteine
  MISC_FEATURE (132)..(132): selencysteine
VARMRFVPQVCPFCGCGCGILVGTDGEEIKLLEPWRRHPVNEGRQCVKLWELPEAVQKDRLERPVRMTESGEPRELSWNRALEEVAEVLSTHEPEEVYFVTSAKATNEDNYVAQKLARTLGTNNVDHCARLXHAPTVVALSELLGSGAMTNSIPDLVEADCYLVAGSNTAEQHPIVYRRILQGLEENDADLIVLDPRRTQIAELADIHLQVRPRTDLIVFLYMAKVIVEEGLHDGTFIEERTTGFESFEEYVREAVSEGDVRRIAGVDPEDVRKAAVRYAEAERGCILYCMGLTHHDIATRTVRALCALALLTGNVGRPGTGVNPLRGQNNVQGACDVGALATHFPGYRPINTETANEMSKIWSFEVPDEPGLKLTEAFDADEITVMYVVGENPAVSEPNTRHAVEKLESLEFLVVQDLYLTETGELADLVLPAAGWAERTGTFTATDRRVQLAEKAVEPPGEARPDWWILEAVARRLGLKGFGHRSPREVFEEIRRVVPQYRGITYERLRRRPGGIHWPCPSEDHPGTPILHTEEFATEDGKARFPKPEDVEYREPERDVDEEYPLILTTGRVYAHYHTRTITRRSRLLSEEVPESFVEIHPKDAERYGVRDGELVVVETPYGEWRCRARVTDRVREGTIFTPFHFGENVLTPHDVRDPESGIPEYKYVPARVRPDSRGSASRG

SEQ ID NO: 322 - protein, 377 aa, Methanopyrus kandleri
VSSVEVQVGGCYLARSSDPDTVKEAACGGVVTELLRHALREDLVDVVVCVERGADALDGRPIVVDDPAEVPSGSYHCAPTQLARLVAELHREDPTLRVAVTCRPCDARTLDRLAERDLVNPDRVYRIGLNCGGTFEPRVVLEILEEHGVDPLDVEREEVVKGHLVIELRDGEEISVSIDELEEQDSGRRENCRRCDENIPERADLACGNWGVPDDLQGEWTFVEVKTEDGRDLLAGALDAGTMEVQEAPGKSVQIRAKIDEVMRKMARSWREKTLDEDWLTEAIEALDRCIKCRSCRQVCPVCASCEEGCWSFAGRESVTPTPVWHAHIAQCVALYCVECGACETACPAEIPLTRIYSVLRERLPDVVERLAEPAEE

SEQ ID NO: 323 - protein, 150 aa, Methanopyrus kandleri
LRAGLFRERDHRRDPFRRCAQGRRPTRHRLGDVRAVRYLRLRVPVRRDHLLIDGEPVTERGVPKLPKNVEVDEDRCVYCGVCMRTCPVDAIQVTKPYQGHIEIDDEECVGCGLCVEICPCNALEFGRDGTAEKTRIVVNLDRVLGPTEKE

SEQ ID NO: 324 - protein, 132 aa, Methanopyrus kandleri
VAKILVTDPIHEDALIKALKEGWIAGLACWGVDGEGPAAVLREAYRRVDVHPVRGVVALAVLEDAAGVLLEGLGEGGGAVVGVFPSGVERAIGSASRSVPLRVVVGAVGGVRGVVGGRERRLAGAVLSDPSE

SEQ ID NO: 325 - protein, 126 aa, Methanopyrus kandleri
VYRTSSPGREEVLELARQLMRNLRSVLKTLLTEVSDLPYKKARRLLARGLALTFDARPSESPRIRDLLEELPNRLEPFLVRTLEGWPAHYSAHLKRIIRRRKSLDGKHETPGVKLELERWKLGHVP

SEQ ID NO: 326 - protein, 566 aa, Methanopyrus kandleri
VRIVDWCALDPRAYDEGRRRVAARACPDPQPYWVNGEPLVFQTPTLIFGDRGDGKYPIAWLLKIQAPSDKRITELDFPERWWKKGGLLWILAITELAEDGRYYSVFPEEDLLWDPYRREGCPYTPHSDLDICTRLGVPFALRYYIDKAPAPTPDMLWKAYVRGVPPPDDGVTTDFGSVLHGTQWYTEGVSKATEGLKLALSALTALYDSAAKRQAEDLGLKAYRAYPAVVQGVVWSSDSSQLLIYQPTLGVSFYDPPVLVRALNSYASALLAAAEDLVLRIALGRPQLAPWQCDDARLENQLREEFVRKVNEELGLNEATVRDFTEAIDRGKEDFESFLKRTGVVKVDAEVETALSTLLARVCGLSTEATVYTYYSMATGEILPLVITPRALPSKGGVTTGSFCSTLTDNLRKAEPGFTASDDLLSTFKYYFNNPLINGAMATLLSWGIEWAIILSAGLIAGPFPAAAELLVSGAPYLAALGSSAIMALLDGWLNNRTWDQVSEEIAVGAAAGTAVYRSVGRYISKISEYADTTASKIIARYYDFSFNWSANSILAATSNLWLIGG

SEQ ID NO: 327 - protein, 274 aa, Methanopyrus kandleri
LPLALIYIFFASVVLWPISVAIIAVKWRRARKILNEAIGSGTVGPYGGVNGETGVRLSSTKVVWYYGIFDFPPIGLPVVALLSAVALGKGWENLTACPGIRNLSMSLLTWVFVNSCLLGIVGKLVWYLRLKRLDVKFIAESKKKVNRNIIKKICEKYKYIDVYSAFNVTLMMWFYNIFAGGIIVSLFTLIFYLTNTKTLLIHRYYYNILTVSISLVILTNSVLIGLWFSRRKYICSPKIQSNSIIIYLITAIVTIYTSVISCAMFEYVITGSLS

SEQ ID NO: 328 - protein, 190 aa, Methanopyrus kandleri
LSDDKRSYARPLGRTAMFVVASGGYYQLYWFYRNWKDFKEYLGRDVNVVLRTIGLFVPFVNLYLVWKQFVEINELLEEAGLDPCPTKILYPVWFGFFFAGNRGIFHAETRVDALGAIVALMVSCVPLLVVQKKLNEYWREVQGGLTPTWSVQGRADGGGGVVPADMGRVADLGVNARSRRTDSGEPRAET

SEQ ID NO: 329 - protein, 148 aa, Methanopyrus kandleri
VPLLTSLVEGEWAPSHDPRMGGLGLAITGLLFLLPTMATAEVVWGPLVVTLVTALNAWYAVKALSSGPSPLVPLALLEPGLAVLCVVCEPVRTWLAGIPKLVAGALICLEGPVDRLFRVDEVSDDGDARADAGRSPIPTGSAAHLTSR

SEQ ID NO: 330 - protein, 319 aa, Methanopyrus kandleri
VLGAALAAILLVLPGSALADAWSPVSKVHLTERTELTLTDQNTVRAHLTVEVLGYGLEGSTRVPIKVLVPSDAELVTAKWKPERGGEVEVEPVSVRTVTWPGNRDQIEWVTYNLHSGSTPYMDALEALFPNKMIRWRELTFVLPVEGTGGYDEQLGTLEVVTTCRTHEGEQGTYFAWPIPAAANPAYEVRVHGLSVGFVAVYDPETGRWRWIVPGEWSYSAPPSSRSANVNTVIVDVAGLPFGLSVEAGGVRVDPGPTWKASRFLSLTRYLPVLVVMEISPVGPAPQRGETASERGTTESTGGIVPTPLIVPIVPVRRR

SEQ ID NO: 331 - protein, 205 aa, Methanopyrus kandleri
LVGSHVPIPHDPVERIRALRVLREVYRRGKKPSLEVTYRTVNGSTCGPYYVARWRRDSRHKRGRTLYLGKPENKSVRFVEWLVSLDREEVLELARQLMRNLRSVLKTLLTEVSDLPYKKARRILARGLALAFDARPAGSPGIRDVLEKLPDRLESFLIRTLGGWPAHYSSYLGKVIHSRRKSLDGKHEIPDVKLELERWKLRHGR

SEQ ID NO: 332 - protein, 141 aa, Methanopyrus kandleri
VPLNVSRYFALAPGTGVSPKELVQWLLENSPPEVTIKETCFGAIADGPEDELRKLAERAREEFGYAVFSKVRGYPAGDPRVCRRTRGGGPRPGFPQLQREVELLDLIAEGLRALDKGEEVELEEREPVSADTIRKLAEELN

SEQ ID NO: 333 - protein, 298 aa, Methanopyrus kandleri
VTPLSTVVRAPATIANVGPGFDVFGLAVDGFHDVVEAHEADGVRIVTEDPIPTDPERNTAGRVALRMVEEFDLPGVSLEIRKGVPMGGLGSSAASAVAAAVAIDREFELGLEESELLRFAAEGERAAAGEPHYDNVAPCLLGGFVIWRFEREYVRLEVPGDLRFVTVTPTGVRVTTEEARKALRERPPSLDDVVNNLSAVALMVHALHEEDAETFARMVGWDRISEPVRKRFVPRYRELRETAYGTGALGFAISGAGPTVFAVCWREDAEDVRTALEDVLDGKCVSAVHRVSDGAEVA

SEQ ID NO: 334 - protein, 409 aa, Methanopyrus kandleri
MNDLLDPIRGIPVDLELVRRELDVDLPTARYLVRTGLITTDGARVLRRGPTTGTCATAAAKAAAIRLLEGRTVRTVRVRLPVGTVIGVRISRVGGDPSEARVRKPGSDDHVDVTTGVTIAARVEETGSEGVEIRAGRGVGETPSGKPAISEAVREQIVDNLRYLVDSYGVGLRVTIEVPDGEEIARKTLAHRHGIEGGISILGTKGLVDPNSEEAIEGSIRSDLRYVERVPCLVTGYRTMDRARRLGIPSRDIVNCHGRYDLALEAVKTGVPADGEVKRFDAVLIFGMPGKLLKLAAGAYNTHAKVADARRESLVTRLVEIGRPDLAVEAARHEGLISEFLRSLDPDVRRELFERVCELVEERVSSDHDLECGCALYFRADDSEEVVEGEGWKRLVRGYDDDLIGRPKG

SEQ ID NO: 335 - protein, 328 aa, Methanopyrus kandleri
VKPVSAFKTLTLRVYWDEARFEVLDQTELPDREVWRECTSYEDAAEAIENMRVRGAPLIGAVAALGAWVAYERDEDYGEAIERLRNTRPTARNLFWALERMEEAKNPRKEAERILREDVEVNRELGDHGAELLPDECTVLTHCNAGALACVDWGTALGVVRSAVFNMSKEVEVIATETRPVQQGARLTCWELSRDGIPVTLIADTAVGYVLASGKVDAIIVGADRIALDGSVANKIGTYQIAVLADRHDVPFYVAAPTSTIDPETETGEDIPIEHRSEDEVKNVRGVRVAPEDVPALNPAFDVTPPELIDAIITEKGVVEPQEVADLV

SEQ ID NO: 336 - protein, 189 aa, Methanopyrus kandleri
LFILVTSNFLSFNRYTVTREELFETGYNLVTKLLKDPPRPYHTVKIRVNGKKGKVLTHAGEPVLFVFAGYPGVSEDAKVFVEMNGKEEAIKPGSTVNLDWEDPNEVLSNVTGFFAGSRYHYEQSVVLAGASLTLSTVLPEDLIERLKELGPPKKLPERAGGEELKVRRMTSSEGILSSIRRLLLRFRRQ

SEQ ID NO: 337 - protein, 327 aa, Methanopyrus kandleri
MNRLDVMILKILAEADRPMGSGRIAELIEERFGEKYSTRSIRYRLQKMEERGLIRRVRRNDRVVGAEITEWGLTMLKTETSSERVGMYISLIEEMAYRCSFDPEVMKGKVVCNISVVKREHLDDFLDAVVETYRAGISPSPLVAVKEDLSDHDVEVGEDEVAVLTVCSVTIDGVLINRGIPVTPVCGGLLYLEDGEPLGMQEYIKYEGSTVDPLHVFVAKGMTQVERVLETGTGLVPANVRYVPWAALEDVEHVERELEKADIRGIVDVPKVEGEILGIPLPPRSLGIVAYGGLVPVALLEERGISTRTYPTRTLVEYSSLEDARRY

SEQ ID NO: 338 - protein, 491 aa, Methanopyrus kandleri
MPRRLQNVYKVPGRGRHQLRIAGKSIPGVSPLADEVYTVDFKKRQKENEEKVEKVMEQVESKDVKFVRLQFVDIHGFVKNFAIPAERLEDALVEGVLFDGSSIDGFVDIEESDMIAMPDPDTFAVLPWRPREGKVARIICDVYWPEGKPFEGCPRLNLKRVMNELAEKGYMMYCGPECEFYLLKQDPETGEVEAHDEGGYFDFYPLDRAEDIRREIIFAMEEFGLEVEMSHHEVGPGQHEIDFKFADAVTTADNVISFKQIVKAIARKHGLIATFMPKPIYGENGNGMHVHQSLWDPEGKENLFYDPDAEDQYYLSDTALYYIGGIMEHAHALCAVCNPLVNSYKRLVPGYEAPVYIAWSPKNRSAFIRVPAARGKATRIEYRSPDPACNPYLAFAAMAVAGVDGIENKIDPGDPVNENLYEMSEEERKELGIEHLPENLRDALEAFKEDEVVQSAFTDHIVEQWLELKWEEWSEYRERVTKWEIKKFIVY

SEQ ID NO: 339 - protein, 389 aa, Methanopyrus kandleri
MFPRTLIPLISAILLATPACATDVGVFAWGSTIRSEGVQKFTDDILSTGYTEVAVLIRGVSTPTRVDTLSAVYSQIKARNPNVKVYAWIVGFERKDGWDKPWDPEVRREILDAVRSALPYCDGIILDDSFRYPTSNPVKREKAMQAITDLVREISELAHSHGKAVYFCLLPEKPEPYSIDRDAIATYVDKFIVEAYTEEYGRDDEWPVRVYNLYERLYPGKVAIALHELNESRLAHQLTLLKEAGCPDIWLFRYGEVKKMGLVRDVIRSITGSASGTSLQWSPVEGGQFDLAGLLLTGLVLGTFGGLVLAIVNPELLNSLGQAAIGIAETAQELLQGAFEAVSGALSGIQEKVLGASAEGDLGPIIGILARVALVFVWGWLLATLLSII

SEQ ID NO: 340 - protein, 355 aa, Methanopyrus kandleri
MDRSGYRGRDERPASRILWMKIEPGTDSVRVFTVRFRGRPDRYVAAWKQPDRVTGADRSVVIVLSTRGCRWFHETGGCVFCSYPLEGAGTRVPPELLIRQFERAYSRHRPDSPHGVKLFTSGSFLDPEEVPDEAVREILGRLAENELVTEVSFESRPEFITDERLELITEVLDGKSFEVGIGLETSDDELRASMNKGFSFREFAKAVKKVREYGGIPKAYVMLKLPFLSEAEAIRDAYMSCVDAHLAGCTRISICPTTVHRETVLEKAWRVGLYRPPWLWTCVEVARKVKGTLGDRVDLLVDTSGAGTPRGPSNCPRCSRRVARALREFTRTQDIGRLEGLKCSCLAVWRTHIVC

SEQ ID NO: 341 - protein, 179 aa, Methanopyrus kandleri
MLCAGNGGKELPRAKVFEGGSLVSKDYEDLKRRYFGTEHGNVLFLDPFETVYLTEKGEIDPETPEGEPMSVEELLSFFERRRPGFRAGYVVYRDLTERGYVVKSGFKYGGRFRVYEEDPDREHSKYVVRVVEPDTELSTRDVLRATRLAHSVRKDFVLAVVEDVEEPRIEYVMWRWKRL

SEQ ID NO: 342 - protein, 81 aa, Methanopyrus kandleri
MAEQKPYYGAWPCHPRDLVEEGVTTSARRARIVLRKYVLGQSEEEIAEEEDISLKSVKYHLEKAEEEGLIDYVKEKFVESE

SEQ ID NO: 343 - protein, 374 aa, Methanopyrus kandleri
LIDPWDVEEVDYERLTEEFGIRPIDEKVRELLPRRFPLLDRGIVFGHRDYDSFLKDYNDGKLVSVLSGMMPSGRMHLGHKTVVDQLVFYQQEMDVKVYVPIADLEAHHARNMDLDRAHRIAVEEYVLNYAALGLDLDPDRCEIYLQSERKTVQRMALLLAGRLTWNTVKNTYGFTGETNMGHAFAPIVQAADILHPQEIEGPHRVLVPVGVDQDPHLRLTRDIAEKEDLIKPASTYHRFMTGLTGGKMSSSKPNTAIFLTDDPETAKEKVWNAKTGGGATLEEHREHGGNPDECVVYELMVYHLADRIGGDEKLREIRKKCREGDIICGECKRMVGEALAEILEELERRREDVRDELPDLLSQHPDAPEVPEDW

SEQ ID NO: 344 - protein, 357 aa, Methanopyrus kandleri
MIPPFQALVTCPAGFEFRCVEELEDILKEQDPYAEAEPTYFKGVVVVRSDLEPEEIVEMMKDADTDWVAKIVPIHRTVRADLDVMKRTATILARRKLDENTSFAVRCRKRGQPPFGQREVEVEVGAAVQEATGAPVDLENPDYYVWIEVLQDTAGISVVPPDLIVSKEVKRVRKWSPGMRPISRAQLKLRELLKRHPYIVREGSDVIDLGAAPGGWSYELARRVEPGTVYAVDPGDLHPKVLKLDNVVHLKKRAEELTEDDIEGRIRLVTSDLNRIHTEATEVTLSVADEFLEPGGFIVQTVKLAVDPSTGEYAAPDVETAVSEVELEYERRGYEILAIERLKRNTPNERTLVARKV

SEQ ID NO: 345 - protein, 176 aa, Methanopyrus kandleri
MRLLKAGDRIQGPGWEGKVTAVLDVDGCRVVITSSNPENVPKRVRGGGTVCELAFHDPVGGFAAYWVEPDHSEATDVGSPEEGTCAVHIGNRWILAEVLEVGRRELSIRIPNVAIPGPGDAGAPVAQNERVVGMLYMYFLEDDCVGRAVRMDVIEERTERALKRLRGRQRARSIRP

SEQ ID NO: 346 - protein, 326 aa, Methanopyrus kandleri
VPVVFDLEGPLSPMDHAYEVMARCVPNGREIFEVISFYDDVVYFEEQREGYEPGTTLALIVPFLVVHGVTEDDLRRVSEDATLTPGARETMRELDATPFVASTSYEQHAMRIAGLVGIPRGHVYCTEMPLDDAPEPSEEERRLVLEMEREILRKFYPPSDADKEELVESVDDFFGRLSETELGEFCSKIEVVGGSRKARVVEEVVDLEDADVSEIACVGDSITDVDMLKFVRKRGGLAVAFNGNEYCIPEADVAVAAPSLSAVLPILETFFEEGKDEAMELAEEFEPEGEARVLNVNRARQRELEEFIRYSEAMRERVRGEAGKLG

SEQ ID NO: 347 - protein, 467 aa, Methanopyrus kandleri
MRGLEEKIRTLQLPTDVRWCPKRMTDRSRGRRWYAVRGSDAVRVVLPVRVSRRDFKKVPKGAGDAAAHPIIEEIKRRSREEPDLYPLSGKLLDHKKVRKLTEPCTVVRLHGFRTPPLWMPGKSNRVLRRSREVLLTVRMLFPPDWSEERVLDGVYAALDALREVVREIPRKEILRTCDVVLDQRELRERLERGEIEHRGKRVVALIGDGARPARRLTDVRRHHRIAGPKPEPHIPFEVPEDPDADLVPLEIELPRTGERKRFLPIYEGELFAIAGANAQGKTTLVNAVEAGQDDHAPGDGREYVITVRRTAKAEAGIKRMNGEDVSLFFRELPPGYEGTPENVRGLASGSMKMAAEIQRALEEGAKILFIDEDKAAVNLLVPGVLTKELEGIRTLVEVRDEITSRGVTIVAATGVLDDFTAAADRAIVMEDHRPKPLNLREFRARLARYYLERARRYRSDAEGPEGG

SEQ ID NO: 348 - protein, 192 aa, Methanopyrus kandleri
VNARIYAAASVLCLALLAASVQWDVLADLPEAWRELNAATELAHKALEEKKKGDELMEEVSATVNAARSAGPLALSVNAPRILEDLHGAYVHYARAVDAIDAAVDHLDRTLDMIGATADPEIKESLKLMHEGVSHYRMALKEFKLGVQAADEGDVGEAFRHVNAAYRMMREGMKLFSRGKAELESKTLLFMG

SEQ ID NO: 349 - protein, 242 aa, Methanopyrus kandleri
MYRTLTLLVLSTTLMAVAAAERLDPVDEDRPHILNVYIEGHEATCFGQGIDTKRLETLGLKHVPEVPTKGEFTVTVEFNTGPHPPERLAVELYFPSWLMVPPKYDLKLPEKGVEIDHPEPNSILRADLEVKVGEGPNPLSIGDEYYLVAVLRDPTKESDVLDYVVFKLRFREPRGGESTPEPTLLKVTRSALGDVSVPVAGFILGSLSALVAEIVCGWIHSGPAALWATVIGGLVGALLVSI

SEQ ID NO: 350 - protein, 74 aa, Methanopyrus kandleri
MLHDPNDDPSEYVIYVIDRGSSSGLRRIWGDEIQDVKRGFLVLWNAEIPVHRVIRVERGGRVIWERGRRARGRR

SEQ ID NO: 351 - protein, 315 aa, Methanopyrus kandleri
LVSLSPEEVRRKCSEKGWVTMYERIATLTDEDRERVLLIEDHPTPVGAEWVVRNYEATSPLVEKAWREGKRHFFLLRVGEASLDLEPSVRAAGVESVEVRDGEVRVTHAGLAGAGVGAALSRGCAEGVSRVEIHEEGGGSRLGRATVVTPELRRLVIGVDDTDTEEEGATWSAVDVICRRLEDEAGVFYSRHVTVQLYPKTPHRTRNCAAVVVELGVPTKRVERVKREFLRMLKEVSFSDHTCAAFWDRLEFPRELRDLGNAAKRRIVSREEVDEVVEICEIEVVSIGDGERGRIGAVAALPFIDDHGLAARVPR

SEQ ID NO: 352 - protein, 163 aa, Methanopyrus kandleri
LAETIVRKFDPNKWVLVPTRHALERLRKRELSPSADVPEAVHALRRLASTTKVLIKNDVWVAVGTERTLVLSEMRTMSLEKYQDELKRHLSRLHPTYTVYVITAEGCRPTSAGQLDVDDLATEFEYARFSGEARTLVLAREGEKALAVVTVRPPRKKERKLIE

SEQ ID NO: 353 - protein, 238 aa, Methanopyrus kandleri
VGNVPRCRRCGYSVELPLKCPRCGEPSFEVAAFQVYPEDVRYVVAFVNESDVHTIHQSFQGDPDGIMLRNLVERLGELLHSAAPRAATAVRTPPWIVDVVERISGVTVRTVRDDFDDVVRSLQAELRADRRLDRVEEPPERKLGGSHSTIIGGRRGRELVLKVASVPYVKRVIPGRIGAKGSRGGGGVRLKVSRVDDSGNVKLLLSEGAATQEIFVVTTARDEREGKLVAELLERVIR

SEQ ID NO: 354 - protein, 107 aa, Methanopyrus kandleri
MIMEILNRHKEKLVKLRVLSYGDRMILSAQFSANDFDEAYEMLQEIMEEEPEVVSLDSDRKQGYAVTLMEDVTEEYQEIRERVHELMRELVEGGEGKEEFPLPIFEA

SEQ ID NO: 355 - protein, 410 aa, Methanopyrus kandleri
VDEKKIEELVSKVVKGEIKFHEVEKYTDGDSEVATEVRRRALERLTGAKLEHLGKYTIDANRAMDKNIENMIGAVQVPVGIAGPLLVHGEYAEGEYYVPLATTEGALVASVNRGCSTITDSGGAHVRIVRDGMTRAPVFKLPSARKALEFCEWVRKHFDDIKEVAESTTRHGELLDIQEFVVGRHVFLRFEFDTKDAMGMNMVTIATEEAVNWIEEKYPDAKCVSASGNVCVDKKPSWLNNVLGRGRTVVAEVEVPRDIVEEKLKTTPEAMAEVNYRKNLVGSAAAGNIGFNAHHANIVAAIFIATGQDEAHAVDGSTGYTTMEVTEDGDLYASVTIPSLNVGTVGGGTGVETQRECLEILGVAGGGNPPGVNAKEFAEVVAAAVLAGELSLVAALAAGHLGKAHRLLGR

SEQ ID NO: 356 - protein, 107 aa, Methanopyrus kandleri
LAISEIILAGLSAGVAIEFAMPAMIRRSLPLRLAVILGVIAAASCSLSILWPILRPVGAVSGLLTGILALAVRAEELKSGHFGAAGFSVRGAASYMLLISLGIYALL

SEQ ID NO: 357 - protein, 218 aa, Methanopyrus kandleri
MKPDRRLDVRGAACPGPSVMVAEELKEMEPGQVLEVIVDSEGIANDIRELVQDGGHEVLKVEETDGDIRMLIRVGGVETDSTATDGTVRTCAGSLPSTDTDSVMIAQSTGVANPERAYATFLMSEAALAMDLDVVIFGFMDGVTVLVEREVERIRHPEFPPLIDKAREVLRNVEACACELSIQARGITSDDLLDGVKVVGASKFLKLITDPGVDVVWL

SEQ ID NO: 358 - protein, 380 aa, Methanopyrus kandleri
VPTVVRIDEFWDMTEGERRSVDAVTCATVGLMSGVYGILSFHVAEPGEVRRFEEVYLEGIRLPVGPCPNERLGLVECVVPATAHGDVSGAYLLRTVAEGNEFDVIAVADDGREYEATIGPEELERAMIASTRACFRNYSAIFNDGERPASTIFAPRPLEPGEASFSGCGGYNPLEHDPKLRLHRPGRRVLFCGAPGVITGKGTRSTRERPNLTLHANLTECDPTFMGEYRTSAGPENIAGVASVIAVTEETLPFLERDHSDAVLPVVKLSDRTPIAETTYADVWVQETVRWNPDRCENCDPCRLEEKCPYPYGDLRTGDCFHCGYCHEFCPAVEVDLGELEVEGRKLPIVARESSAYLAKKLMERAIEAVEEGKIDILRP

SEQ ID NO: 359 - protein, 84 aa, Methanopyrus kandleri
LASDRDDVDVLDILRETMELLEEFAERLEDVDAEDETWTTSEGSRKFREDDEPRCDREFKKKMLENAPRSDDGYVIAERAHWLR

SEQ ID NO: 360 - protein, 313 aa, Methanopyrus kandleri
VVGLGWAERVVRECLRLSEGERFLVLTDPEMEELGRELFEAAEGTDRALVVVDPRETHGEEPPDHVAAMMRSSDAVAAVTSWSISHTEARRRACEAGARVASMPELTREIAERAIDVDYEELRRLSRELAELLTEASEVRLVTPAGELVMDIGGREALADDGNLRDPGEFGNLPAGEAFVAPIEGSAEGCVRIDGSVAPDGILDEPLELEISEGRVVEVSREDLEFVRLIRRIENGEMLCELGVGTNPGAKLCGVVLEDEKVYGTVHMGFGDNSTFSGRVSSRVHLDAVIKEFELYLDDELVARSGELLGVSL

SEQ ID NO: 361 - protein, 157 aa, Methanopyrus kandleri
VTRYKVGLADTTFARVDMASVAEKVLKEHLPGVETPRYTVPGIKDLPVACKRLIEEEGCDLVMAFGMPGPTEIDKQCAMVASMGLILAQLLTNTHIIEVFVHEDEAEDERELHELAVKRAEEHALNVVKMLEKPEALTREAGMGRREGHPDVGPARL

SEQ ID NO: 362 - protein, 331 aa, Methanopyrus kandleri
LEGIRNQIERVLDPREGACGIAHATLEVLSWSGYRVECLEERLGVRARLIGPDGSVTEGRDVTWAPAILESLIKSGVYPEGWEERLSEVLTPERDMRRLARVFGYGRVLTVDRVAARIILGGGGTVIVRRRGLGSEVEIRYDGSKSDYVSYCPACALALAAVRHPQVYRELKRELADAPNTGKVKAEDGVVNSVRVRRGIAFATLKLANRSITNRGCCVAYAIVRAELKAGYGSERSKRLLRAYCDECPLKHCWVGKPISALGNVVLQRLTETEGGVRLKVEEYPEVVTPAGTGRGTLCALSACANAVLRLDASKVLKPDPSRSEAWGDDR

SEQ ID NO: 363 - protein, 314 aa, Methanopyrus kandleri
MFDPKKFVEEAIEELRREIGDRKAIIAVSGGVDSTTAAVLTHRAIGSHLVCVFVDHGFMRKGEPERIRELLEEELGLNLRFVEAAEEFFEALRGVTDPEEKRKIIGEKFIEVFERIAEEEEAEVLVQGTIAPDIIESERGIKSHHNVGGLPEKLNLDVVEPLRDLYKDEVREVARYLGIPDEIVERMPFPGPGLAVRVLGEVTPEKVEIVREANAIVEEEVEKAVEEGKMSKPWQAFAALLDCKATGVKGDERDYGWVIAVRIVESIDAMIADVPEVPWEVLRNIQDRITSEVPEVTRVLFDITPKPPATIEFE

SEQ ID NO: 364 - protein, 242 aa, Methanopyrus kandleri
LAFVVIPSVDVVEGKCVQLVEGDPERRTFESDDPVETAHQWSEFFPWIHVVDVDAARGEGDNSDIIGRICEEVDAKVQVGGGIRSAERAEELIELGADRLIVGTVAFTDKDDFSKIVDVCHDHGIEVFVALDVNENHEVLVSGWKEDAGVTLEDAIERFNEVADGYLTTAVHVEGKEMGIDEKVVEKSTGATDLPVLYAGGIASIKDVKRAKEAGAYGVVIGTALYHGDIDPVALLDLMEED

SEQ ID NO: 365 - protein, 283 aa, Methanopyrus kandleri
VITVAVPNKGRLHEPALKLLERAGIGVEEPLGRRLKARTTDPDIEVMFVRAADIPRLVEEGVAQLGITGYDLIVEAGAEVKELLDLRFGRARLVLAVPEESDVKSPEDLDGGTVATEFPNIARQYFEDVGVDVEIIQVSGATEIMPRIGVADAIVDLCSTGTTLKVNRLRVVDELLETSARLIANPDATDGEVIRRVYLSLKGVLNADGKCLVMMNVPRERLEEFHELLPGVTGPTVSEIYGDEDMVEVYAVVNEEDVSEVVLRAKELGAEGIIVLPIERMIP

SEQ ID NO: 366 - protein, 431 aa, Methanopyrus kandleri
LRLAILGGIAVTPERVIEDAGILIDEDGRISFVDTREQLEECEDWEDEIELGEKDVIMPGLINTHTHGPMTLFRGVADDMPLMKWLREEIWPLEERLDAEKCRWGAALAAMEALKSGTTCLADMYFFMDAVAEAYAEVGIRAVISHGMIDLGEEDKREEELKESKRVYRKCQGMEGLIEFSLGPHAPYTCSEELLKEVRRLADEWGVKIQIHVAETEDEVKEVKRKHGKRPVEYLDEIGLLGDDVIAAHCVWLDDKEIEILSKRGVIVSHNPISNMKLASGISPVPEMLERGVNVTIGTDGCASNNNLDMLEEIKVAALLHKVNKMDPSATEMLEILRMATVRAGTVFSSEKIGAIEEGYAADLVVLDGSSPRLNPNHNPISNIVYSASGSDVKHVFVAGELVVKNGKLVKADEQEILENSTECAEQLTSS

SEQ ID NO: 367 - protein, 436 aa, Methanopyrus kandleri
MTFTALTGVYSMQYGELVETYRVTLGDKTYEVPVEYYVWKNGNGHFVWVSLGVHPLEYQAHKCMFEAVKWFVYNSGEFEGTLVVSWIKIPAEYYQSGSEEEKYRVSRDLGQLTFYNHVLPYVLHPKELGSKVGVPITRKPELFLDVHAHRPSWGVSEFILIPAGPIHGNDNPESFQRALQICEVLAGVIGARVDTQQTGTSPPWVTAPVAKHGIPAATFENGYYYIGQELPPNYDNYRTELDKAFLEALYLYALEGGRVPPTPEGYRKLARWYAMAAETWGRTVEYLSKAAETHPEYRSELQRLAEIAAKIRDLLVEMSEECKRVAELLERGQRDEAARLVDSELIPEYEEVTRLYDEYISGTKRIPVRISDVFASEEHESGDYIEVFGVKLPVSLAATIAGAGILAAVITFKVSVNPLVGLIACGALLWLSRRWS

SEQ ID NO: 368 - protein, 424 aa, Methanopyrus kandleri
LVVVKEGEYAIRDPSLAPKGRDMIEWARDHMPVLGAIRERFEEERPLEGITVGMTLHLEAKTAVLVETLMAGGAEVAITGCNPLSTKDEVAAALVEEGVHVYAWRGETEEEYYQNIDRVLSHEPDIIVDDGADCIARVHTEFPDLAERVIGATEETTTGVNRLHAMHREGVLKFPVIAVNDAKTKYLMDNRYGTGQSALDGLMRATNILLAGKTVVVVGYGWCGRGIARRARGLGANVIVVEVDPIKAMEAIFDGFRVMPMDRAAEEGDIFITATGNRDVIRGEHIEKMKDGVILANAGHFDVEIDKEYLEEHCEEKIDRRGGLVTEYRMPDGKRVYLIAEGRLVNLAAGEGHPIEIMDISFALQALSVEVLAKEGKEMEPGVYKVPKDVDKRVAELKLESMGIELEELTPEQREYMKSWEEGT

SEQ ID NO: 369 - protein, 39 aa, Methanopyrus kandleri
VRLWRLTAVMRLRNVMSRLVLALKEVEGGIIVGLLYDSN

SEQ ID NO: 370 - protein, 323 aa, Methanopyrus kandleri
VFLPEIDDRCHELAERYGVRPYMVARYLTFLGRSETERLLKHMEDIRPAIRTNTILIDPEELRRVLEEKRGFELKRCPEPVDVGFWILNDPPISIGATLEYMMGYYVPQDAASMLPPVVLDPKPGDRVLDACAAPGGKTTHLAQLMDNEGTLIAIDVDPDRMRALKSNLARCGVANAVALRMNALDLPSTDWEFDRILLDAPCTGEGTIHKDPSRKTSRDPEDIATCARLQRRLIDAVVDVLRPGGVLVYSTCTFSPEENELIVQYAVDEHGLEPEPVDVGWADRGLRVPGVEPKVRRTCARLYPHRHGMGIFFVARLRKPLS

SEQ ID NO: 371 - protein, 150 aa, Methanopyrus kandleri
LGALEEFEWKLAEHDVPIPVRQDAVALYRVLLETVRIWGIEREEGVRESRSEVRARISCEGLDCAVLTKVGEDRPQLLLRTVLGPRLLAEVFERAHESGVRSFHFDLQGRGLRVEGEYDVGIVQIKVVGGGAGWELLEDLEKRGFSVTGL

SEQ ID NO: 372 - protein, 356 aa, Methanopyrus kandleri
VHVLIASGDGGHLTRALALAEELSDRGHDVTFAVNEDSDQAVERLKKAGFEEYVGLPRPRRMGDTSWKAALGGLKNYLAASKVLRDVRPDLILSTGAGVAIGPMIAGKFKRLPVAHYEPTDVVSVSGKVAKLCADIIGVWDEDMAEYYGDRVINVGIVLPRSFEEADPEEAREKYDLGDRVLVWTTGSAGYKPALEGLVRCAEEGLLRDWEVVVNTGNAMDPKRLKRALNGLCSGIVVKRFFHDFPALLKAADLVVCLGGATPVEAAALGKPVVVLPRRDVLRDHQYVTAKKLEKRGVAVAAEDASNPEEVVKAVSRALSIDPEDLKRMGERGKELFGGNARERFIDLCEELVASG

SEQ ID NO: 373 - protein, 402 aa, Methanopyrus kandleri
LGVQVGIVGKPNVGKSTFFAAATLSPVETADYPFTTVDPNQGVAHVRTECPCKAFGVECQPRNSSCIDGNRFVPVELIDVAGLVPGAHEGRGLGNKFLDDLRQASVLIHVVDVSGSTDEEGRPCDPGTREPAEDVRFLERELDEWIAGILRRDWDRTAKRASLEKIPAAEVLRERLAGIGVSASDVESAMERAEVPSDLTKWSDEDIRRFAREVRRVNKPMVIAANKIDVECAEENLKRLEEEVEYPVVPTCAEAELALRRAADQGLIRYLPGDSDFEILQEEKLSDEQLQALEFIREKVLKRWGSTGVQEALNRAVFDVAKMIVVYPVENENKLSDSEGRVLPDALLLPEGTMVRELAYNIHTEIGESFNRAILVKPDGSREVVGEDHELEHGDVVKIQTS

SEQ ID NO: 374 - protein, 146 aa, Methanopyrus kandleri
LRILALILLLSLPLTPALAEPTPSAGYSSPSEQPAQEEVKTEEQMVETSNVPPSEAVRPSTPEREKEVTTTTSAAGSSETPEITKSEKTNEKKENRVVNLREPNPVEKKNNANVTMLMGILAASALGAYSIAKRKRREALVKVPAA

SEQ ID NO: 375 - protein, 120 aa, Methanopyrus kandleri
MAQNVEQQVAQLQQLQQQLSSIVAQKQQLELQLREIERALKELDEIEEDTKVYKTVGGLLIEADRDEVKEELEDRKETLELRVKTLEKQEKRLQQQIENLQKRLQKALQQAEGGGGAGAA

SEQ ID NO: 376 - protein, 83 aa, Methanopyrus kandleri
VHALRCEAELKSERVARVVYESVLPDVKLMPARRSRVDIDRRGNNIQIEIRAEDVSALRASASGVFRLLALSERVITTVLGDV

SEQ ID NO: 377 - protein, 192 aa, Methanopyrus kandleri
LRPAAITTSQRPARRTRSLCRDLECALPDATYVLRGTKNLRDTVLEALESGAEVLFYVTEAKGNPARLHVIDLGEIPPRLRLSFWLGGVKLQRELFGNRVDLSGDLVITTSKRPVSGHMKVAESLSEVLGVEFVPRAGSLEDVLEEALADVLLVVEGHPRHLGTLTFYRRTEKVGPSLFYRDFRTKDERMKL

SEQ ID NO: 378 - protein, 51 aa, Methanopyrus kandleri
MYEEEKYEYICMRCGKKVRLDINEDPIRCTHCGFRLVMKPRHPVPRRYKAR

SEQ ID NO: 379 - protein, 89 aa, Methanopyrus kandleri
VGRTKKVGPAGRFGPRYGMRIRRRVAEIESVQRQKHECPVCHKRAVKRVGTGIWRCTKCGAEFTGGAYYPETEAQRIVRRAIRKALEEK

SEQ ID NO: 380 - protein, 267 aa, Methanopyrus kandleri
VDLDLLARIKRHEVLAAIRAGERIDGRDFEEFRPIEVRAGVISKANGSALVRLGNTQLVVGVKLEVGRPYPDSPNEGALAVNAELVPLADPSFEPGPPDENAIELSRVVDRGIRESEMIDLEELCIEEGEHCWVTFVDIHVLDHDGNLFDASMIGSVSALSITEVPKAEVVDDEVEVMEEDTEPLAINDFPISVTIAKVGEYLLVDPCLEEEVIMDTRLTVTVTESGEVCAVQKGELGDFPEHLLEDAIDLATKKAEEVRRTVKAQL

SEQ ID NO: 381 - protein, 239 aa, Methanopyrus kandleri
MEERPERLISEDGLRLDGRKPDEMRPLKIQAGVLKRADGSAYLELGANKIVAAVYGPRELHPRHKQKPDRAVVRFRYNMAPFSVDERKRPGPDRRSIEISKLSKEALEPAIFTEYYPRTAIDIFVEVLQADAGTRCAGISAASVALADAGIEMRDLVAACAAGKVEGKVVLDPMYYEDGYGEADVPLAMMPKEGKITLLQMDGDMTPGEFKQAVKLAKKGCKIVYKEQRRALKEKYGGD

SEQ ID NO: 382 - protein, 239 aa, Methanopyrus kandleri
VPEFELYVEDRQVVTPGELLARGQVIASEGTYTSGDEVYSKVTGLVDIDGRRIRVIPLAGPYRPSPGDFVVGIVEEVKFSSWLIDVRAPLPAILHVSNALEEEVDLIETDLSRYYRPGDVITAVVREVDPVQRVELSLLEDDAPTRLGRLQGGQVVEIDPVKVPRVIGRKGSMIKMLKRVLGCDIVVGANGRIYVRAREEPKKERELLAVRAIREIERRSHLRGLTDWLKANLKRLSRW

SEQ ID NO: 383 - protein, 355 aa, Methanopyrus kandleri
MGTVETLTEHLRELVGRVAPPGWEDEVREYVEATLEKYCDDVHVDTLGNVIGTIEGSEYEVMVAAHMDEVGFIVKSIDKNGFIRFAKLGGIDDRILPGSRVIIVNSEGEKVPGVVGTKPPHIQEPKDRRKVPKHKDLFIDIGASDREEAEELVSVGDVGVLAGEFVELVGSRVNGRGLDDKIGVAVLLALAERLADLDGDHPTFYLVGTVQEEVGLKGAKTSAFEVYPDGAVVLDTAVAGDVPGVKEAELKLGKGPAITVVDASGRGLITHPKVRKLLIDTAEELDIPYQLEVGEGGTTDATAIHLTRGGVPTGVVGIPTRYLHSPAEVLDLEDAKHALELVVEVVQRFPDYVPR

SEQ ID NO: 384 - protein, 240 aa, Methanopyrus kandleri
MARVSLEDAVVARLEKGGERFEVLVDPEGARKFREGEDVDVEEILAVEQVFRDARKGERASEQAMEELFGTSDPIKVAEIVIKEGEIQLTAEQRRRMQEEVKRKIIHIIARRAVDPRTGAPHPPERIERAMEEAGVHIDPMKSAEEQVKDVIKQLRPVLPMKFEEVKVAIRIPAKYTGQAMGVVREFGDIEREEWQYDGAWVAVVRLPAGLQDEFFEKLNEITKGDFESKILERESVEGP

SEQ ID NO: 385 - protein, 246 aa, Methanopyrus kandleri
VAVQPAQTAYDRAITVFSPDGRLFQVEYAREAVKRGTTALGIKVEEGVVLGVDKRVTSKLIEPESIEKVYQIDTHIGAATAGLVADARVLVERARIEAQTYRYTYGEPIDVDVLVKAICDLKQVYTQHGGVRPFGTALLIAGVDTKGCRLFETDPSGALTEHKATAIGEGRQEALDVFEEEYREDMTLQEAIELAVRALYEASREETTADNLEIAVVDKQGFRKLERKKIEEMFERVVGSEEDEGE

SEQ ID NO: 386 - protein, 164 aa, Methanopyrus kandleri
VKHMRVRLSSALRPRWRYVTFKVWSERVEALDFGGMKDLVVRALLSVLGPTGTGRIGPWLVRSYRDLNAGILRVRRGQEEEARAALSLYRRDPKLGRVFIEVLGTSGTIKGAERYLSRIPKWDRERVGNREFVLYENGEVDVVEDGRIVAFASFECPLPEENRG

SEQ ID NO: 387 - protein, 244 aa, Methanopyrus kandleri
LRVSENFALRVHVDEVDPLRMALAAERLDYEIAVLCLELEAERLNIDDLRWLIEEIRDIREHVESVLVLPGCKLEAESAGALRRAIRRTRPLVYLLAVGGGDPKINRAAVSDTRVDLLSHPERGNPHAGLGKYEIELAREKWTYVEIDLSRLFRREGERLAWQVSRIRDLLRLRRRKRFPTTVALGARDPLELIRPKQVEDLLKLMGFEDSEVKEMCVEAPREILRWNAACKHVFTVPGVVSLG

SEQ ID NO: 388 - protein, 153 aa, Methanopyrus kandleri
LTLPVNSISARVIAHATEDEKKVLEALANVLGGVLEEGDVEPETFYAEGHHGNPITIFQVKIDRPKYIERVLEHWRENIPEEERRRVWSDIERRVDDKGNLYLRFDKQSAYKGELRISDADDVIRVKVNLESYPASREGGIKTLERLGIFSND

SEQ ID NO: 389 - protein, 197 aa, Methanopyrus kandleri
VDAVSMYKYQREAWKRPKDSYVGELLKERLPKWRKGPSVQRIKRPTRIERARRLGYRAKPGYVVVRVRVPKGGRRKSRPKKGRRPKRMGKNKFSPGKSKQWIAEERAQRKYPNLEVLNSYWVGEDGQYKYYEVIMVDPYHPQIKSDHRINWICQKSQKGRVFRGKTGAGKKARGLRKRGKGAEKVRPSLRAHRRRGK

SEQ ID NO: 390 - protein, 246 aa, Methanopyrus kandleri
LRTEELKLKLKELVESIEDEGLRELVMKVLEEGFAHEEVPDPEPVEEAPASRRQHHSYPGGLLEHTVATTKLALAMAEVFEEIYGLEVDRDLVIAAAILHDLGKATSYERREERYKISDFGRRLDHLTLIAAELYARGAPVELIHAVAAHHGRGSPVPPNTPEALIVHLADRSDAEFATEVIKAARNVVRARLRELDVEPTDELVEEVLRRVGPSEIFLTRVREGRDAVRQLVAETLEEIEEGSSP

SEQ ID NO: 391 - protein, 499 aa, Methanopyrus kandleri
LPDRVRIFDTTLRDGEQTPGVSLTVEEKVEIARKLDEFGVDTIEAGFPVASEGEFEAVRAIAGEELDAEICGLARCVKGDIDAAIDADVDCVHVFIATSDIHLRYKLEMSREEALERAIEGVEYASDHGVTVEFSAEDATRTDRDYLLEVYKATVEAGADRVNVPDTVGVMTPPEMYRLTAEVVDAVDVPVSVHCHNDFGMAVANSLAAVEAGAEQVHVTVNGIGERAGNASLEQVVMALKALYDIELDVRTEMLVELSRLVERLTGVVVPPNTPIVGENAFAHESGIHSHGVIKKAETYEPIRPEDVGHRRRIVLGKHAGRHAIKKKLEEMGIEVTEEQLDEIVRRVKELGDKGKRVTEDDLEAIARDVVGEVPESEAAVKLEEIAVMTGNKFTPTASVRVYLDGEEHEAASTGVGSVDAAIRALREAIEELGMDVELKEYRLEAITGGTDALAEVTVRLEDEDGNVTTARGAAEDIVMASVKAFVRGVNRLARRRRD

SEQ ID NO: 392 - protein, 341 aa, Methanopyrus kandleri
LKIRPEDLTDFVSEALHAVGVPRKDARTAAEVIVEGDLRGFHSHGVLRLPGYIEGIKRGAIRPEMRIEEISRKSSVVLYDADHSLGHVVGYRATLEAVELARKHGLGMVAVRNASHYGIAGYYTTLVAERGFIGFTTCGTEPAVAPYGGSQPVLGTNPVSIAFPRRDGPPIVVDMATSVVARGKILQALRENREIPQDWAVGPDGEPTTDPEEALEGALLPFGGHKGYALCLALEVLAGPVVGAAAGKDVQGTTDPTVPCNKGDVFVALDLSTLVDEHEYYERLERLISQVKSAGDDVLLPGEPEFRRRERALREGIELPEGSVRAVREVAEELGLEDPTR

SEQ ID NO: 393 - protein, 188 aa, Methanopyrus kandleri
MGMKRIEALRVVADVAERYDAVVTVHLGFPARELYRVNDRRLNFYMLGAMGQSCSVGLGLALCTDREVLAIEGDGGLMMNMGVLPTIAQERPRNYTLVLIDNSTYATTGDQPTPSDRIDWEKVAEAHGLTYFEASEPESAEVALEDALATEGPRMVRLEVEPGNADVPLIDLDPEEIKVRFVRALREG

SEQ ID NO: 394 - protein, 256 aa, Methanopyrus kandleri
VKAFEKSVKIPKVDGATVMLDKGLTPEFVESFLKVAGEYVTAVKLGWGTARLIDKEIVARKVEMYVDAGLDVFPGGTLAEIAIAQGNFEGYLNELDELGFNAIEISDGMIPMSIEKKCELIERACEQGFTVYAEEGKKRDEEYSVLSPSDIVGRMNKCVEAGAEYVIVEARESGKHGPMGAEKRERVRVLSEIVKGVGIQRVMFEAPEKEQQFELIVKFGPEVNIANVPPEEVIPLATLRAGLRAETMGRVALDGE

SEQ ID NO: 395 - protein, 167 aa, Methanopyrus kandleri
LNVDDAIVEALEEAGITFACWLPCSLLDGIIRRLEEHPEIRTVRVSREEEGVGICAGAALAGEKPALIMQNSGLGNSVNALCSLTLTYRLPLLMLMSHRGYLFEDIPAQVGMGKAAPKILENLNLHAFTIERPEELDVIPGAWKLAETAGEPVGVFLSPRLWRQTGR

SEQ ID NO: 396 - protein, 310 aa, Methanopyrus kandleri
MGDRPRRLGSRLLYAGCVLLTETVDAIMDKLKSNCDIVRVQVEDVSFHLRVHTNDAGVSRELRLRNIREPKASKYLVGKFLNDEEIAFDVGANIGYYAILTALASERSRVYAIEPVRENLELLRENIALNNLEDRVKAFEYAVSDKCGRIRMILENRSNWHRIVNAEDGDYIEVESITLDELSEKLGERPTYVRMDVEGAELEVIRGMVELLESDDPPKLFIEHHIHLLGLDATLDLIETLLDYGLEIAAAFGYPHASLHDREGGYRPLVGEVVRWRGLDVELYEPSFEELHDVIVEKSWDCFHVFYRPV

SEQ ID NO: 397 - protein, 166 aa, Methanopyrus kandleri
MAAKGELVGSKVLVRNDRDANRLYSSMYGKPSRRGLQLWPEEALFLCEIGRLEVRSGNVRISPEELMDRFVEEDPRFPVRYAVYADLRRRGWKPKPGRKFGTEFRAFRGEDERIAVKVLQEELDEFTAQDILEWLKLVEGTEFELVVAIVDNDYDLNYYVFSELVL

SEQ ID NO: 398 - protein, 79 aa, Methanopyrus kandleri
VTVGRRLDAFLRDVGLAESRREAKRLVESGRVRVNGKLVRKPWWLVSPGDEIEVDGVTVRVEDNGGERRVSRIEGARSE

SEQ ID NO: 399 - protein, 159 aa, Methanopyrus kandleri
MISRVVLTTYVYPTEDEEKVRKAVGNLFDLEMFEEREEEMGDLRRLEFVCEGPQARLSLGRIYELLREQEILDAARRVLREGVTAEGSILFHLNKQAAFAGSVSFAEGGESPLGPIVVEVFPERPEDVEKVIDWLAPETIDGKPIYEVKKPRLREEELE

SEQ ID NO: 400 - protein, 196 aa, Methanopyrus kandleri
MLICVVGMPGAGKGEFVKVAREEGIPVVVMGDAVRREAERRGMDVGEMAKRLREERGMDAVARLVEEDVERELRRAGVVVIDGIRNPEELEYFRDRFGERSVIVVAIHASPQTRFERLRIRGREDDPDTKREFEERDERELGFGIGDVISRADVMIVNERVSLPEFREKCRMVIRAILRGDPDDLPGGFDHLRVPD

SEQ ID NO: 401 - protein, 357 aa, Methanopyrus kandleri
LGEPAAVPRAAELRLVKCPPPRHFPEMVKLSRALFRLLVEEHGTDGALEKLADPRWFQSLACLLGYERNTSGSTTVVTAALREALDPEEHGIAVAGGKGRLALETPKRVRELADRMNLDPRQLVTASRLTARSDSVCLQDGHDLYHHVIVFDENGRWVVIQQGMDVDRKTARRYHWLDSEVSEFVEGHPVVADETRKVLSLQGDRADKCREAVLDLVGDGPDRVLREWRAVRNSISGPLDEYLGREGGVEVPDGWVPRRLDRDALRRLYEVNPTDFKEFLTVRGVGPSLVRALALIAEVVYGEGPDRRDPAEYTAAFGCKSGDPYPVHRELMRLAAELLERIRSPRLRRFLGRVTES

SEQ ID NO: 402 - protein, 333 aa, Methanopyrus kandleri
MELLLTLAPDVRPEETERMARKIQDKLKLPAEPDPLKPVRRLRIEGVEDPDGIVSKLREEFPEVSRVVIVKRRGRSHDLDRIAAQAAKLARGEILPHHTFAVDARRLDKDLPYTSRDLAIKVGEAVRRVTGASVDLDSPDRYVDVHVSRHGHLIGITPATLREPHRSWLPSGAFKHVHVCCERPETEYEIADLIRITAALGLGSLILVEPNRDAVRGAEEKVGASSLIDLRIEEDLKEALAEFDVVVGLHPTAPNAESELLRAVEGANQICLLTGSETKGLSREAKELADVLVHLGPTTAEPMRTANAVAYAVGVLAARTVSLGSATAPTLHR

SEQ ID NO: 403 - protein, 275 aa, Methanopyrus kandleri
VSGLVLERIFEEAEGEGRGALIGYLTCGHPGLEETVSLARALRDGGVDILELGVPFSEPIADGPTIQKAVDEALRAGTTPWDCLEVAEEVSEFVPVVLLCYYNTLHANGFERYLSAAAEAGVSGIIVADMPVEESDEVHSVARDLEIDVIYLVAPSTTDERLKKIGERASGFVYVISRYGVTGARRDLSEDTLELVRWVRDHVDVPVAVGFGISERWHVEEVIAAGADGAIVGSAFIKEIHRSEDIAEAEERVRELAKELVEGARDGYRRRSSSE

SEQ ID NO: 404 - protein, 319 aa, Methanopyrus kandleri
LTLIAQIAASFGALLLGAWLFTNTVEWISYRFKLPSGFTGSFIAAVATALPETLVPIVAIIAGYREGVAVGAILGAPLMLSTVAMGIGGLSVLAAYLMGRRRRPVIKTSHFSLDARHFLVAYSLVLAVSLTDFKPAHFAVAAVLFLLYLVYVRRLLRTGDVVEQPSIELEMAHPVLAGLLAAVFLVGSVALLVAGAHGFADAVERLAERLGADPFTVSCLLAPIATELPEKLNSVIWYLKGRDDLALGNVTGAMVFQATFPVAVGLLFTSWRLGSRELATVTVPLAAMVLLYLYSRRNGLDWKVMSAVAVLYPVPFVLT

SEQ ID NO: 405 - protein, 102 aa, Methanopyrus kandleri
VSGTIKLSRCGLRAPTCEPVRRSYFERLRRYRDYQVRELYESGVRIKVLARVFDLSEGEIKEILLSPPRCARCGKPLRTNVPLCSECERVLEGDDRSRTDGR

SEQ ID NO: 406 - protein, 165 aa, Methanopyrus kandleri
MIGAVLMGGKGRRLGGDKPWLTVNGRPIVEWATEMLRRIGCEEVYAVSPRRDGRWDGPWLRDSKGSGPMAGVRAVFREFPNEIVCVTSCDVVFDPRIFREVAEPPCHTRGTLFPFLVRAEDAPEHRTVREFLKNIGSTELEVPATDLDELEDLPRYRALLSRITG

SEQ ID NO: 407 - protein, 665 aa, Methanopyrus kandleri
VVSDVIVVGIDIVRSEPPEYAVAILEDGEEVLKKRLSKRELFDLILSLKPDVVAVDDVYELLDGASEFLELVKSHPELKLVQVTGKPGDQRSLQRLAREHGLPTPDPRNPEEEALTCARLAELGVGVEAFVLEDETRVRIGRLRRPGQGGYSQSRYARNLHAAVKRATRELQRLLEAEGMEYDLRVRKAEGGYASAEFTVYERYDRVKPVVNKVDAREIKIDVEPVLRDRITFRDTSHRRELLTIGVDPGTTTALAVLNADGEVVHLESSRELSFSELTERIESLGRPAVVATDVTPVPQAVRRLARSLGARLYVPDRRLSVDEKRELVKGHLARRDQNIRPRDTHQRDALAAAVKAYHAIVKPALRKVERKASEEIKRRDVLRAASYVIKGLPVVDALRIVEEERQVERERREEREKIHRYRERIASLKKELRAYEKKVKKYEHEIEHLERLVERLKRENEELKEKLDRMRDRMEELVEEKIGRKLEAKEREIERLRRELIREKSRRERLERELRRAERLNAILRSGKGIPVVEVEKASHEALAGLETPPVFVLYVEDPSGMSESNVRELSDLSPEAVIVPEDASIPEHALEEFRRLDLPLLREGEDVTVKRAGTLALVESDELRRAVRRTRKRWEEREREREKERILRCIEEYQRRRRGKFIR

SEQ ID NO: 408 - protein, 127 aa, Methanopyrus kandleri
VNPAPSELRFGAYAIDCVITAVMSLLICLALARPVTPVRFLSTWSLISWIYWTMFEGTYGESPGKRVFGLKVVNEEGEAVSLPEAAIRNVSKALPVVCYVDGALILLTESRQRAFDLLAGTFVVTSG

SEQ ID NO: 409 - protein, 179 aa, Methanopyrus kandleri
LIAVLVDDGFEELELGAVVSVLSRGGLDWDLVGVEERAEGMGGMEVGVDSTVWDVEGDDYEGVVVLGGSAPTTLIGYRHCLDLVRSVESDGGMVVGLSSGALVLAEAGVLRGRKATTYPGFEAELKVNGAEPVPKGVVRDGNVVTSRGPAFAIDACLEVVRELCGDHMANSVARQLILK

SEQ ID NO: 410 - protein, 141 aa, Methanopyrus kandleri
LLVVSLGCPKIPPKISSAIYACYRYDDRALVLSTEAGCKLLEYADPEKEYVDETRTYEKYLEDPDAAGILLAFVTNDTELQIAVTLKEVSEPDDARAVCTEEFEDRLEDCGFLTAPVTGRRWKHDPKRWVKAVEDVLGASR

SEQ ID NO: 411 - protein, 97 aa, Methanopyrus kandleri
MTFCLEEREYEILMARRPFDDCARYIESKFGNIVKLQPGEEILPGLRAIGYGKIPVAYGDEWIVLPITKPCHGSFVVKIEVSAEELEWFLKKHVSGR

SEQ ID NO: 412 - protein, 243 aa, Methanopyrus kandleri
MGKRIRPQRLGRGGPTYRAPSHRYRGRIEHRPYDEQEKKGKVVGKVVELLHDPARNAPVARVRFEDGEERLILVPEGTKVGDIIECGVSAEIKPGNTLPLAEIPEGVPIFNIEGQPGDGGKFARAPGCYATIIAHDVGRTYVQLPSGKVRTFDPRCRATIGVMSGGGKREKPFVKAGKKYYHMRSKGGKWPKVRGVAMNAVDHPFGGGNHQSPGKPTTIARGDPPGRKVGHIAARKTGRGGRR

SEQ ID NO: 413 - protein, 95 aa, Methanopyrus kandleri
VAKRYGPKIEDPHDVLLYPVATEKAMRLMEAENKLTFIVRRDANKPLIKKAVEELFDVEVEKVNTLITPTGEKKAYVKLKPEYRAEDVAVDLGIL

SEQ ID NO: 414 - protein, 260 aa, Methanopyrus kandleri
VEAPVFNLEGEEVDTVELPSFFEEPVRKDLIRRAVLAAQANRRQPYGTDPRAGFRTSAESWGAGHGVAMVPRVKGRRHPAAGRAARVAQAVGGQKAHAPTPEKDWTQRVNRKERRAALRSALAATAKPEFVKERGHVIDDVPHLPVVVVDELKSLNKAREVREFFKSVGLWADVERAKSNRRIRAGKGKRRGRRYVKPKSVLIVVDEDEGIKLGARNHPGVDVVEAMHLGVEHLAPGAHPGRLTVFTPGALEVLEERLGE

SEQ ID NO: 415 - protein, 361 aa, Methanopyrus kandleri
MGRGGRRNPGRPRRGSLAFSPRKRASRPVPRIRSWPDEERVRVQGFAGYKAGMTHAIMIDDWPNSPTEGEEISVPVTILDAPPMYVAAIRAYAPTPDGYRCVTEAWAEIPEELEMDRVFTVPKDGEAGDLDKIEELVDEGIVEEIRVIVATQPKKAGVPKKKPDVMEYRIGGKDVRERFEYAVEILSEEIRAKDVFDEGEIVDVSAITKGKGFQGVVKRWGVTIQDRKTQRKQKGRHIGSIGPITPSRVRWTVPMAGQVGYHQRTEHNKRILKIGEDGEEVTPRGGFVNYGVVRGDYIMIHGTVPGPKKRLIRVRPAVRPPKNAPEGAPEILYISRTSQQGVRPKASEDEIVEQLGGPASA

SEQ ID NO: 416 - protein, 249 aa, Methanopyrus kandleri
VDVRSAERLLEDLKEFAERVNKAFSRINPQIMERRTPRGWLREMVREYFENLGAEVLREACEIAKEDIRSYRELDELLQEIERSTDREEDVLYVRRALLRYMFCRTYTLQRLLVRLYWSLSAGTADVAELVGMLRRMDLFAEEAQLIYPVTPDVEDLREAVKDAIQVIGEEVGAGTEEEDDRLEPEPKLEVCVVRGKLPAFVDPDTGAEVPPSKEGDLLMVGETAARILSERGRRWGGPFAEHVRRWRG

SEQ ID NO: 417 - protein, 93 aa, Methanopyrus kandleri
LAKIPKKIRTYCPYCRKHTIHEVERAKKNPARKMSWGQRQFERVLKGYGGFPRPKPSGEKPTKKVDLRYRCTECGKAHTRKGWRAGTLEITEE

SEQ ID NO: 418 - protein, 73 aa, Methanopyrus kandleri
LDEKRFLKRFTESDLVPQPRSRFLRVECVDCGNEQIIFGNASTEVKCHICGRTLAKPTGGKAKILTKIKEVLE

SEQ ID NO: 419 - protein, 267 aa, Methanopyrus kandleri
MPRKLRDLPEEGEIVMATVERVEDHGAFVTLDEYPGVDGYIHISEVASGWVKNIRDYVKEGQKVVAKVIRVNPKRKYANLSLRKVTDHQRKEKLKEWKREQRAEKLLEMAAEELGKDLDEAYEEAGYKLIEEYGSLYDALERAAAEEGPEPLLKAGVPEEWAEKLAELAIENIEPGRVKIEAYVDLTCPAPNGVEIIREALEKIEEFQQGDVKMEVQYVGAPRYRITVDAPDYRTAEKMVRKAAQAAIDHVEEHGGEGEFHREIEEG

SEQ ID NO: 420 - protein, 66 aa, Methanopyrus kandleri
VPKRLRRCKECGEYTLQRDKCPHCGGDLEVPHPHRFSPEDPYGKYRRKLKKRVWAEKFGPPSGEGD

SEQ ID NO: 421 - protein, 269 aa, Methanopyrus kandleri
LDLLKLARGNTVIKFDFEPEVEEPVLVEGLPGIGHVGKLAAEAMIEDLGAEKFAELYSPYFPPHVSVNEDGIVEVMRNEFYVYESEGDEPDIIFLIGEAQAQGELGQHEVTIRILQTVKEFGTEMIFTLGGLGTGTVPTEPKVVGAATHKELIDLLKEHGIEVRSGDKGGNIVGASGLLLGFGKMMGMKGVCLMGVTPGHVIDPRAAMAVVEKLSTILGVEVEADSLKKRAERFEREFVAQLEEMPSALEEAQQEAEEGKPEEDLRYIG

SEQ ID NO: 422 - protein, 188 aa, Methanopyrus kandleri
LVLRATLTPLHALIFGLTLFTAFIRPPLAPIIYEKRERYDPWNSIVLAALMIYGLAPLVGLENSCLAFLVAKGVDGAGGLAQFIPGSINPVVSLKGFRIREVEEGISPIGTFFEFLAALGLGWLITGSTQGALVMGIAVTAADILSNVTGVEDHHKGDDLLMMLSAAWVIQTFGVSGLMRLLGLMPGW

SEQ ID NO: 423 - protein, 164 aa, Methanopyrus kandleri
VDLRYLTSAISVSLFVYSGIDTEPLQYVTAQWVESVLHLMGLTVPKAGYTFQVGTVSAMIVKGCVVWPAISLFVGLIVATPGPSVLRKIAALAASVALLTAGNVLRLASMFYMMEVWGVGFRLAHDVIGQLVGLAIVILAAWVAFYIVPETEDKLREIIPWPGE

SEQ ID NO: 424 - protein, 417 aa, Methanopyrus kandleri
VGEQYDSDLHLHSQYSGGTSPRMVIREIARGAAKKGLDLVGTGDILHPKWRRHVRRELVEDEYGLLKEPKTGVLFVPTVEVEDERRVHHLIILPSLDHAEELHGELSRYSDDIDAEGRPHLRMTGAELADLLKDHDCLFGPAHAFVPWTSVFKEYDSLRECYGSAMDRVDFVELGLSADSDYADRISELHEYTFLTCSDAHSPYPHRLGREFVRFELEEPSYDVLKAAIRRKPGGRVVLNVGLIPELGKYNRTACARCKRQFELEEAERLNWRCPECGGTIKKGVRDRVLELADLEKPKHPNHRPPYLRIIPLAEIIAKALGLSTITAKKVRAVWNSLVRRFGSEIDVLIETPIEEIAEVDERVAELLKSFREGTVNIRPGGGGEYGKIITEEESEREEPRSRKPVQRTLDELIGRG

SEQ ID NO: 425 - protein, 483 aa, Methanopyrus kandleri
VTRLFFRRRSVESFAERIEVKVGVEEELFLIDRDGSLTRAADDVIVKAAELLESDSNLLEDCWRTVLGLDPEPNPAQIEYLTQPLPPDEVIEACEIGRELIKKAAEELGLQVMLESMHPFESDPLPINGTHINVMVKLKDQPYMTPKQILVVYNWLWHNLPIIIAATANTPYCCGGKNLAASCRLLKSRVLKPNYYAAIKRLEKRPYLTKTQYYGRLRYRLRLRKDTEFEERVVAHPDGRRLVDITPRGPASNVTGDENDSPTRNRVEVRVIDNQKSMKYLHDVVMLIVGLSLEALYIYEVEGKLPPNDPNHFDNRREAIEKGINATFVINGREIDAEDALLKIISRVDKFLEHLGLRFVSPLKNGKVELQERPKLNVEYVHKDVIKYIGNYAEVILGSNKTVEIKGKRYTIPKGTKVIGKLVPMASYKYRVDNKGFVKDIIKGVVTLGIKRNGVEIPLDESDRIVNVMSELEYLMRSMRGLL

SEQ ID NO: 426 - protein, 243 aa, Methanopyrus kandleri
MIIDVHNHLGEDIDSTVQTPQMLLARMEAAGVDIAVVFPFNDVDPGVCFSKANDRIAKACEEYDEFVGFCRVDPNYEERAVEEVERCIEELGLKGVKLHPRSQSFYPDDPEAVKVVEKAADLGVPVILHTARGEPFSDPVRVGKLAEEVPDVQLIMAHMGKELGYDAAIEVAENYENVYLEVSLVKDPKVIEKTAERVGDDRIIFGSDSPYGSPSVQLEIVKEADVNHDKILEENAANILGLR

SEQ ID NO: 427 - protein, 176 aa, Methanopyrus kandleri
VLITAPHAQGPGADVFTGEIAWKVAQATGAYALVATVSRRAKLEDGNPADYNREWARNTPFRRRIDELIKRYGVRFIIDVHGMESDPVRPDVDLGTLGGRSAKGKLVSKIVKRLEEAGFDVGFEQEFQGGDILEYHCDGERVQGVQLELSEELRELGEYRAIQAVLVVVNTVLEEV

SEQ ID NO: 428 - protein, 143 aa, Methanopyrus kandleri
MVAVVLVGHGSRLPYSRQVVEKIAEYVEEMGDFETVEVGFMELCEPTVQEAVKKAAESGVDKIVVVPVFLAHGVHTKRDIPKMLGLEPEWDDDEDDHDHHHHHHRDYTPVDVDAEIVYAEPLGADPRIAEIVIDRIKEALGEE

SEQ ID NO: 429 - protein, 215 aa, Methanopyrus kandleri
LIIATLTGRTIEDMVELAIEAVEQGADALEVRLDYLENLDMSTALRAVRECTRYERVVATLRREEEGGLYKGDEDRRLEILERVSSEADYVDLELDVAEEEIISPSCETIVSYHNFENTPPKEELIGIRDRCAELGDVAKVVTMARGHEDALRILEVVRTAEAPTIGFAMGEEAKYTRVVSVLIGGFATYAAVRKKAAPGQLTVEETRKLLELLG

SEQ ID NO: 430 - protein, 245 aa, Methanopyrus kandleri
VEREITPIVLREGYEFINDCSESDVIVVGAGPAGLTCAYELAKSDVDVTIVERKLYVGGGMTGGGMLFPAGVIMEETAEVLEEVGVELRPAEAGLLAFNPVEAAIKLANAALEAGARILVGIEVEDVIERRGRVCGVVVNWTAVKAANMHVDPLALEAEYTVDATGHEAAVCKLAGIEVKGEGPMWAERGEELVVKHTQEVKPGLFVAGMAASAVKGAYRMGPIFGGMLESGKKAAEEILERLTE

SEQ ID NO: 431 - protein, 123 aa, Methanopyrus kandleri
MTIAEFVAVGVLTLAIIVAIALIVRSREVPEGEGLSMLRDKISLTTRSDVITKKVDELIECRVEELIDSWGLATTEDVEKVEKRVDALDRKLNELEQRFNEFRNDIRRKIERLESRLRELSSE

SEQ ID NO: 432 - protein, 123 aa, Methanopyrus kandleri
MVVSVLIGSTAAVIIVLIALKTYSKKLRIRELELKVEREKVELVRADLERRKLLDLLFYLPEDTRLMKRVGEIRSLLTRLAEKYMDVETRLTVVELETELKRLEKILKDLERVEGDVRGGENE

SEQ ID NO: 433 - protein, 261 aa, Methanopyrus kandleri
VRILITNDDGIASPGLRAAVRACRSVGEVTVVAPATQQSGVGRSISLLEPVRVEEIEVEGVDALAISGTPADAVLIGAFSIMDEPPDLVVSGINLGENVSADVTTSGTVGAALEAYGNGIPAIAISQEVRDARARVDNNAKNVDFTLAIRVLKALLEAIRGANWEGVLNVNVPDPDRWNGEIKVVPLAFTMYRPRIEKRYDPRGRRYYWIDGEIIQDPPEGTDLYELQRGSIVITPLTTDVTGDLDAAENVIKELRRALRG

SEQ ID NO: 434 - protein, 279 aa, Methanopyrus kandleri
MQFWKVHGARNDFVLVDETEEEVVPESDKPDFARWACDRRSGVGADGVVFIRSDPPSVEMRIFNRDGSEAEFCGNAARCVVKYVTEVRGENVKILRTLSGAHRVEVQGGWIAVEVPEAEIKKVVELGYEVDAGVPHFVRLTERDPIHDFGGLTDEAKTIFSEYEPKGGVNVTYAAPSVDELRVRTFERGVGWTPACGSGVVAASLVYSEIFGPFEEVSVRTAGGCLRVSLSDGPLLIGRAEIVYKGELRGDWRENTDHQRRRHSLSRSPSGRPRLQECR

SEQ ID NO: 435 - protein, 245 aa, Methanopyrus kandleri
VRPLSELDPEELIRYISESPKRTIAKFYVKTDDPEGLAERLEERLEDAKVFTGVDHVIVIGEHDDVVEVLESEDSVEYYHKELDHRNRAVPLADYSEFEDVRIEPGAIIREKVKLGKGVVVMMGAVINIGAKIGDGTMVDMNAVVGSRAEVGKNVHIGAGAVIAGVLEPPSAKPVVIEDDVVIGANAVILEGVRVGKGAVVAAGAVVTEDVPPSKVVAGVPARVVKDVDKKTEAKTQIVDALRCL

SEQ ID NO: 436 - protein, 192 aa, Methanopyrus kandleri
LRRLVLINNKDSFVYNLYHLFASYDLDLKVVSNKVPLSRLERLRPDGLVVSPGPGHPERDAGVSVPAIRRFAGEIPILGVCLGHQCIGVAYGAQIRRAKRIVHGKTSPIEHDGSGILSGLESPFQGMRYHSLVIEESSLPEELLPCAWSGDDGELMAVRHADYDVYGVQFHPESFMTEGGDRIARNFLELLG

SEQ ID NO: 437 - protein, 468 aa, Methanopyrus kandleri
VRLTVRELDIDRSPDEVYAALRTLSSHTFLFESAEIGASGRYSFVGFSPALRIECVDGRVRVDVGDPEYADLVVEGRKETDEDHFQLMRRVFSRIPKVEGSGFVGGLVGYISYDVVEDWLDVKSTTVADPEWPSFELCLYDSVVRFDHYEDRVELISVHPDDYEVEWTAEAIEECVREVSGQTAPKVHRTGELKRDLEKEEFEGIVERAKEYIISGDIFQVVLSRRVEVRAVADPLEVYRRLRDINPSPYMYCLEFGERRIIGSSPETLVRLEGDRIITKPIAGTRPRGSTPEEDEELAREMLEDEKELAEHAMLVDLARNDVGKVSRPGTVEVTRLMEIEKYSHVQHIVSEVVGERKEGVTPWDVLRATFPAGTVSGAPKVRAMEIIDELEVYKRGPYAGGVGYVSWTGDMDFAISIRTIFSTGRRWFTQAGAGIVYDSVPENEWFETENKMKAMVGAILEETSSDK

SEQ ID NO: 438 - protein, 196 aa, Methanopyrus kandleri
LPFPMERFMLSITLWNTMTILITTFGGLIALTLDRLVTRYAPDVLRRSMNNPPYAPILVKLARKLGFDVRRYKEADVILTLKLGPLLIPAINGFAAGAFGMWVLQNFGPVFLLGAALLPHGVIEFPTLIIAGAMGVHLADYLIYRVRLHERWPHGNLEVPSWVIRNTAACIAGLTVAAYLEVHITPIVAGCVMKCA

SEQ ID NO: 439 - protein, 544 aa, Methanopyrus kandleri
MPFDRDKLEELRSLAQRDFDRAWKEGAKLVREPGLRDRYPRLKVETGEPHPLFETIQQLREAYLRAGFREVVNPVIIPEEEVYKQFGPEAAAVLDRCFYLAGLPRPDVGLGADKVEKLAEVLGREPSEDEVERLRETLHAYKKGEIDGDELTHEIAEALDTDDGTAVRILDEVFPELKRLKPEPLEPPLTLRSHMTAGWFITLSEILKREDPPLKLFSIDRCFRREQREDESHLMTYHSASCVVVSDDVTVDTGKAVAEAILRQFGFEDFEFVPDEKMSKYYVPGTQTEVYAYHPDLEDSIEDEELGPGWVEIATFGLYSPVALAEYGIDYPVMNLGIGVERLCMVLHGIDDVRSLAYVEYEPWEPSDLELARMIDYERKPATSFGERLVREVVRGLHEHADEEGPVEVELFRGEFGDREVVVHAVEEEKGEPLAGPAAFNRVYVLDGNLYAVPPEGDFGREIREEGVYSGVSFEEGLAARLAYEVEELLATGGGETTVSVRKVSRPSQVNLSLPRKLLRYVTKKGGEIEIKGPVFVTLRAEVR

SEQ ID NO: 440 - protein, 167 aa, Methanopyrus kandleri
VRPLPLIVACAVALASPALAWERTEVSVDTYVLNYEGDAPNHLMLDVDIADENGNVFVGWLLDGLESKSEPRVWEGLMDRVTVILNAIYDDGKLRLEMRKTFTVHFDYDGNDGVHVYVKGDDAPIIRTEDGRTVLVWERCQRRRIRSSEDNGRRCERSEMEGRTWRR

SEQ ID NO: 441 - protein, 71 aa, Methanopyrus kandleri
VHWIAEGWARIRVKVAASNSGKVLRVLDISWHYDKEERREERQERGVPVGAVASLTGVVLAWMLRSSRSRY

SEQ ID NO: 442 - protein, 464 aa, Methanopyrus kandleri
VDAAILTVSVLSLCVDLNKQADRLETHLPPFRLSSPYPTPFRYVLARPESIEVHPPMDPEGELRIEVLPSGSKVLFDSREYGARTVVEFRGPYLMVTRLPVVGLPRDLPRAAVFFSDGRRNYALISYRDVATGRAYVALCEIALNLHELVRVPVPISLDLGERLSEFTLYDNGTFSAKFEAGGGELVVRGSLRPPGLSVEWDGEGELIGEKRPILVPGTSWALLNKCPVIVFGQGTNDLLWPDREYLVWRTLTSYRSELEDVVEEIVKRSKRSIDLGPALLCAYSTLAGLTVDTLSQVRPPRLWSGPWAWLGAVVETVVGIPVLEWGVLLPIVTRTGELIGTVAPTVDRSGVVTGIYWLTVEWYEAWLRRVIMRTCGLSWWETGMLWGALDALFNSLKERSLNPHDLMRRLTFHVAASLSPVLEVALYAENAEDTGGDVITYYSSILAAMVRWPEQSLPLQRLL

SEQ ID NO: 443 - protein, 217 aa, Methanopyrus kandleri
VEDLHHRGTSVSEIENLRETIENIREELDALDEARDEAQVILRDLHKLSSEAVYEVHRGNLEEARDKLDEAAELVSELHDLLGDFPELLRTGFAENHLQEYAEAEILYSIVKDRRAPSPEEINVSPRAYLLGLLDAVGELRRIVVDALREGDLDRAEEFLNVMEEIYSLTMTFDYPRAVVPNLKRKQDVARSLLERTRSEVTIAGKTEELKKTLERE

SEQ ID NO: 444 - protein, 452 aa, Methanopyrus kandleri
LSSLSRQELTARVFVEWEETRRSLRECVKKVLLNEGVRDHRVWGTIHAYCFELMKRLRTVDAFLEATIRNAKLFDLDPWVRNALRVGTFEMKFNDVKPAIATNEAVKIVVECVGEGPARFVNAVLYDVERLELSDVLNRAKDTVERLAIEYSHPEWFVKHLMDLLGENELTKLMDANNREPERYLRVHAHMVDPDKAILALEDDGVAVEEDPDLPFMLRVVDHDVPPVRTEPYRRGWVAYQDKASAAAAYALRPEPGDRVLDACAAPGGKSAYLYALTEGEIELTCVDVNPRRLREMRRNFRRWGIEARLRRADSSRLYRETDETFDLALVDPPCSSSGAYVRAPEAKWTVKWRHVKRYARGQLSILRGVAPLVERTLVYSTCSVTVVEDESVVRRFLREFDEFEVEEPFGFGSPGFDSWMNERYPWADRVRRFWPHRHRTEGFFVARLVRS

SEQ ID NO: 445 - protein, 319 aa, Methanopyrus kandleri
LYLAEVAGIEELSAVAVLGIGGGGDVVGACHTYRWIREGIEPERLVLGGLTWERAVVDPEPGPRSRDEIVGDVEWIHERIGILRGRARPRRGQEFAESRVRRVLRRMGHRDVEIVLVDVSGGVKGTVDGLKALIEHFELDVVFGIDVGGDALARGDEPGVESPLADSIMTCSLSKLEETVLGVFGWGSDGELTREELRRRFSEIAAEGGYLGAIGLTGRDVKFLKKLAEVVETEASLIPLRAAVEGELGPLEIRGGYRTVELGPASVCTFYFDPEVVARGSILCELVDGTESVEEAHERIRKELGIKTELDWERERAER

SEQ ID NO: 446 - protein, 282 aa, Methanopyrus kandleri
VLLNEVKVRKIVELALTEDVGRADLTSSIVEGERAEAEIVAKEEGVVSGTLPARLTFELLDCEVDVLVEDGERIQPGDIVLKAYGEATALLAAERVALNFLMRLSGIATATRKVVERVREVNPDVIVAATRKVHPITGFLEKKAVSDGGGDLHRFGLDDAVLIKDNHLALVGSVRDAVRRARERVGFTKVIGVEVESIEDAVEAAKAGADHVLLDNMKPAEIRRAVNEVRKVREDVILEASGGITPENAPEYAETGVDVISLGWLTHSAPALDLSMRVRRMT

SEQ ID NO: 447 - protein, 325 aa, Methanopyrus kandleri
MSTDYLPIGSHEVIRALHDLEPDVVAYLPGFPLNEVVRALEESDHPFEVVPVASEFDAVGIVIGLAQADGYGVAVLKDKGAYVAAQLLAEEGDWPGLLIIGLDADGRGSYTCSVELPDVLRDLKLRVEIPETQDDIYETILDAAESSRDEHRLACVVLTEDLLLSSHPPGKPEVEPTGEADWDELLRAIDFYDTVAVVVGKGVLGDISRDLPAFTSSLNDDRDALDRLVEILESLGLDVRLYCTKHASKFLPGIPPTGVNTGNVVEEELLVLVGASYDTFAVDFRSDFVVSVNPDPDAYAHRVADARFVMTLSDFVRELEYRSRK

SEQ ID NO: 448 - protein, 164 aa, Methanopyrus kandleri
LRPEEALLALRKVLKEEDRVIVDLGDHTIAAAKVGLDPDGGTGALGGSMSVALGHCLGTDGGRVYCIVGDGGFFMHLHTLATVAQNRDRFENLTVVVVTDAAWGMTGGQENPAVHTSPADIARSMGFDPAEIAESVEEALEVLKRCRKEGPSLVEMRCRPITFL

SEQ ID NO: 449 - protein, 171 aa, Methanopyrus kandleri
LEERIRCEICGRVINGRPKVVKVEGSELRVCEECAKFGREVVKPRPRRETGRVQRERRPRRRPTGARRRPRGFDPFSEGLEVVPDYDERVREARERRGWSQEDLAKKIGEKVSVIRRIESGKMEPDVELARKLERVLEIELLERVSEEDTGSVGIGSGELTLGDVVEIRKK

SEQ ID NO: 450 - protein, 191 aa, Methanopyrus kandleri
MSLVKSAKNDVVIVVGEDIDEFNKGVLSSVCKETGKVILFGKDYLNKFSIDEKLETSEESLPIKRCDVAIVDEDTEVDGKLLLDVPADEYTINEVLSLVKEQFKEVCDYERGVEADVLLVIDSDRGRLRIYANGDEDEVEDKARELCMKVAERVVEERRSAHIDIRTYGFALVSVALAIVVVTLILRTSPV

SEQ ID NO: 451 - protein, 541 aa, Methanopyrus kandleri
LHVVAVDLGTEVISAAVGRLRSGNLMVKGYSERYILDPTIMERGNVRYVKGVSRIVKKTVEEALRDAGVSPSDVEGIGLSMTGDRFTMVEAEASVSPEGKLRIEDIGYTLAHRLEFSPENWPISVDIVDLKVDGAEVDPRELGADHPDGLIGSQVTHLQFRAIVSNTSLGLINNLERIARLLNMKLITISVEPLAVAKAIRDYKIENCLLIDSGGGTTDISVVRNTLVEVCHSIKVGGRDFTLAIANDLGLTYEEAENIKKKINSPMADSELSRYDLTRREVLEAIEEVAEYVRDAVRSAVKSIIRSLDMNVPERVELYGGGVLLDQAETAVREAILDAYRDYLGIVPRVEMLEASKIPHIGKQLAGPMRVVAVSVLRDTALCQQCSGRDVKVVIDEFRAPEGRYYLEVGGRIEDSVKIPRRTGLKEAIISAIKEIILMQPAPVTAELRGRAYAGTVTIKFEGVDSTDDVDGVKVNVSGSEVEDTVDTLPKEYKIVQVKEMGPILIPVDELQEVEGGVSETAGNVTGLKEGLDDSGGNEPR

SEQ ID NO: 452 - protein, 103 aa, Methanopyrus kandleri
LNLVAEAVRRFKSVDLIRSQILGLKGLLPRKDRAVEVSTGARLVEEAIEVRNAVRSGNREALIEELGDLLIEVEAFLTAHDIDLEEIVERQRTKQRELGQMEG

SEQ ID NO: 453 - protein, 182 aa, Methanopyrus kandleri
MIGKRKVERLLDEFPNEVEYHRSDDHVVTCPTELYLVPTPIEIVVEILRKLELTPKNRVVDLGCGDGRFVISAAYLYGCEGMGVDVREDVLELARAKSETLRVDDKTIFIHSDVRDIDLRELNPDVVFVYLMPSLLEEISEELVSCGATVVSYTFEVPGLGVPEVLRLDDLRRAYVYRGVSH

SEQ ID NO: 454 - protein, 130 aa, Methanopyrus kandleri
LFVVIRSDSYEKILTSLSDIERYAGIKILGKPRIMDPEVADTIVRELLGEVRRRYPVAAVARVEGEPAEVIRKISEIHPPAHLIVITPRHGDVYRGIARRFGKLEELRGYHSPKRRIEDDREKEGRETAR

SEQ ID NO: 455 - protein, 140 aa, Methanopyrus kandleri
VNIVGVDVSGRHAEEDGHYNRITACVSAEVDGFNVFTVRDVNVFVVCTREPPNLRTLTEEVSRALNGLDKDDEYMVVAEPGEFFGEPEWRVSALLGAPFKYAETVAEREVVEMAHKLAYGVYRGVKMGLKVAQSPSGGFG

SEQ ID NO: 456 - protein, 423 aa, Methanopyrus kandleri
LPSRPRAVLVERLEWRQESRIDELKELAESAGYDVVGSFRQVRHEDPRYHIGEGKVKELAEFVRENDVDKVIFENEIKPVQAFNLAGELGVEVIDRFQLILEIFAQRARTREAKLQVKLAQLKYELPRAREMVNLAKKEERPGFRGLGKYEADKYEEMIRRKIAKIERELRRIEKDRELKRKHRHRLGFELVTLAGYTCAGKSTLMRALTDETVYVDSKMFSTLDTKTRAVDLDGHRVLLTDTVGFVDNLPHWLVESFKSTLEETAQADLVLLVVDVSDELPEIKRKLRVCHRTLEEIGAEGPIVTALNKADLIGWEEAERRLRELEGYVSHPVVVSAKTGEGLDDLKAEMRTVLSRYWKNVRIELPMRNETMRVVSKLHELGNVLDERWSNDGVEVFLEVSEKALGTVRGTVKGFGKVEVLD

SEQ ID NO: 457 - protein, 145 aa, Methanopyrus kandleri
VARDDEIAVLTQSRLERVARSRPRGDLWEFLKRAYEKGVKIDAGHLIILSVLEEANRLLDQLSKTVGEKRAKQILKEAGIYTKTGNYVSGELLKEYINRESRVAVHNRVKDLRKMGFKIDGKPGPDGGYSLIQVPEWYRKSSRED

SEQ ID NO: 458 - protein, 212 aa, Methanopyrus kandleri
MRAEMWATKEYPRVKPEDSLEQAVRELTRYSEYTAVVVNGSDRLVGLVTSNDIARGLTAGAETVEEVCRSPESISPSDPITKAVEILTDSDLTLVPLEEDMRVVGVVTLRTVVELMSNLYDTPARDLLEKIHENVPGISWDEFIEAATMVFNRELNRDLTPEEFERKISDRTFGYVLWLMGGLENLFIYLFRLGEAVVARKVAKRRRELRGM

SEQ ID NO: 459 - protein, 252 aa, Methanopyrus kandleri
MKTLEISIDKVVEMVLDRVEDADEDTVLEVLSETPAVRREFVTIDPERCVGCKTCYEECPVDALTEPDSTNPPEVDHDACVRCRLCAKSCPVDAIKVVSGEARVTKDSIEVKLEEVDVIRRKFVLRKAILRKDRCIACRLCEQICPVEAPNIDKLRIDEDKCIGCKACEHACPVDAIVIERTLTPPEFEREIELDQDMCIGCEVCVEVCPVDAVEMEGDVANISYDRCIRCGECARNCPTGAIKIKEVREEV

SEQ ID NO: 460 - protein, 147 aa, Methanopyrus kandleri
VDVIVEVREVVVIHELCRACGLCEKECPTGAIEVEDSAKIDEKDCVRCGLCVEVCPFDAILLGRATCELPKGSYRIEVLTKRPEVSVRISESKCVGCQACSSSCPVEALFGAKGSPPKLDVDRCVGCLECVRICPSRAIEPVGGFRG

SEQ ID NO: 461 - protein, 379 aa, Methanopyrus kandleri
VVVDLHFSFEDRLRNVTINIVEVERPDECAGCGLCAEVCPTGAIEVDERVRLDEDRCVACSFCVQACPRDVFRFYEVSFTELKPKRRPVRVPKADIEVRFIGVDLRTCDRCENRPCIEVCPTGVMREIIEEHRIDLDACHGCLECVKVCPYGSVTVELEVPQLKRRSNPRLNRELCVECNRCHEVCPTGAADNVPDGDPDPERCLGCYNCVAYCPTEALKRPDHRPRPKCTDEVFYIQPDMCIGCRICYDVCPVDAIRIEEITRMPVIMPDLCVRCGLCADACPTSAVDRVPTEEAEREVLRSRISDAFLGILTREMLEAAEEFGSTTRTERDVEEKLSELLERKMSEEMIRRVIEFEVKNVIEELMAEVVSGRDSRGP

SEQ ID NO: 462 - protein, 192 aa, Methanopyrus kandleri
LLQDFLNHILSREGSKRLLDAHTSREIMQRPPRFRDFPDVDLDRCILCGACADACPVEGRDGCPPAMEMSEEGPVLHKERCIRCGLCVEVCPTGAIEMGTLHEEVEERVQPPKPARIVVDSDLCVGCGKCESACPSDAITVEETAEVDEERCVLCEVCLEVCPVAGAIKLVPTDTDELVKRWKEYLEASLRG

SEQ ID NO: 463 - protein, 409 aa, Methanopyrus kandleri
VKRRRREIQSNVQVVDVETGEIEPISHRVPVGPNHPILKEPLRIKLAVRGEEVVDCKVEMGYCHRGIEKIMEGMPWQKAAFLAERVCGICSHAHNMCFIGGVEKLAEGDPAPRGLFLRVLVQELDRIQSHLIANAAYFYSIEHETMFVWNMNTRERVLDCIEEITGNRILTGWNVVGGVRMDVTEDQLNNVLETLDAIRDDVITYRRIAKNDPFIKLRSRGVGVITKDHIRKYRVVGPQARASGVPESDMRLQEPVYPELGFKPVYRKEGDNLARILVRYDECLQSIELIERIVDELPEGRHRRELEVNAGHVDNRVEAPRGELVYDMELAPGGVVKRVTIRTPSVPNIRVLEAIAPGSPSIADAVATYASLDPCVACNERFVVIDEREGKVLLEGKAREVIRACSRTS

SEQ ID NO: 464 - protein, 162 aa, Methanopyrus kandleri
MSLKSALKKLKGFVRSRSIHVTVVNTGGCNGCDIEILACYTYRYDLEQYGIYYHNNPRKSDVLIVTGPVTYQWRDKLVKLYHKVPEPKAVVAVGTCACSGGIFNQRGGRVCGPVREVIPVDAEVPGCPPRPEEIVSAVVDVLPALFRSWEFRRGGAREAQEA

SEQ ID NO: 465 - protein, 146 aa, Methanopyrus kandleri
MMRFLIRRKNITEEDLNERYAEDPNLVLRIKKWILTSYAYRRDIVHRLAELLNVDEDHVIDVLSRARSCSGLYGLHSEVEQAERLLDNVDDEVITLAVLMDVVSDGKLSEALEDELLRMFEGRKSVPIDRKELTKFFTSLRERGII

SEQ ID NO: 466 - protein, 114 aa, Methanopyrus kandleri
MIGFEGRMFVEAVIAGAVAMFLVGSLVGLEYSYRMYPEIFRERRVDPISLLLAVLGWTLLAVSWMRSVPVGIWIAAFLIGYVVNMRPGYGRIETVLGIATFLAALTWLEGLGPR

SEQ ID NO: 467 - protein, 79 aa, Methanopyrus kandleri
LRSHLCVLSLSLVGMAAILLLEHSIYAKAGGVLLLASSVIFLVCARLEHVLHRTEQLAVVAAILLILGVSIHALRVGHL

SEQ ID NO: 468 - protein, 283 aa, Methanopyrus kandleri
LIVLETLVGITEAFLVGSVFLGLHRKVMARIQRRPGPPIVQEFLHTLKFMLKEGYAPLTSAEFLYWMVPVFNVIIWSAAVTISAVYRGNLLPFFALYASYKVLSHGAGVSSGSTYTKIGGVRHAIMPAGELALACSLISAYFVTGHMDVTGILAWEHAHGPLIEHIPFSALAFFTLLWVDSPYSPLDPSKGYDIVEGYLTEYPGFLRGLMYVAEAIKYYCELWVFQAVFLGISDPVSHLLTMGVLTLLLASMCALTPILNPYQAVGFHVIIASMMFLDFLVLG

SEQ ID NO: 469 - protein, 67 aa, Methanopyrus kandleri
VRWVPVVAVLVADMTLVWADVARPWLVDRYHGVFSALTILAIALTIFVLGWALSPRGDRDRTPFLGY

SEQ ID NO: 470 - protein, 223 aa, Methanopyrus kandleri
VYPSGKVLFIIPLGDIVPYLSTINMIILAVLLAVLALPILSNTDVYVEIDHRRPRIKAKIVSPREDKIKAALALVSTLAATGVVTTGDVFNFTLFLSLLGISNMGLIGTTVEDEFALECAFNYGLMCLIASLPLFGGAALILASTGTLSVHELMKMPKGAGGWTLTYGKALLTAGVIGEAGVGPFYAVKVDSFRRIWGRYAFVIHLTTLLTFSRYLELLAALP

SEQ ID NO: 471 - protein, 225 aa, Methanopyrus kandleri
MIVPHVVPEITVKMYHVAVAAGIAVGLIAAVDIAADRNPLNRLTMTDALEVGSLTLLASVGTDLAECLILPGLVVGLAELIATAEVLVARYTDGDSLPEFEPLDMEVLRTAPTAIMIGLVVYGVLLTGFTGGAVAGSGAAFYLFSRANRPHYEEWRGMESISGIGWAFWVAGFSTFFLHPKAWLLALILAGTGGILVKVGPKLTLLGYAMGYDVRAGARRRVPER

SEQ ID NO: 472 - protein, 169 aa, Methanopyrus kandleri
VSVTAKFSRALNAIRRPESMVSVYCLLLAVLALLGLHCGHSYHREQLYPRPAPQVQMKAGDPLAPYDRGGVPLESPGVTISQYPQFEPVRGWVTSYLTPFTRWLAHNSRHCGTTIVSHPGGILDEILYYTRGLDTVLESSIMFVAFVTFSWIVRTKTIGEEEMEREGGE

SEQ ID NO: 473 - protein, 95 aa, Methanopyrus kandleri
VHECEAILYTGAFMIILGTLGAAIGPARSDPVVKSLNLELATVGVCLVFLAFNHLLALITFIAVGAFTTPILMRAILRVEASERDREVLEGSERD

SEQ ID NO: 474 - protein, 80 aa, Methanopyrus kandleri
LNWLLLTSLTACVLGSIATVLRRDPLQKLPSIALVKSGMICAVAAEGYLDVAAAGVALEAVGTIMFCVYLIRIEEVRRSA

SEQ ID NO: 475 - protein, 87 aa, Methanopyrus kandleri
VISAQAVMAAIVILMSLRLLVARDLYAQMLYLNVVGFGLAGLVATTWRTDMGLIAALCVFIFSTLESNAVSYTIQKIEEIRRAGELD

SEQ ID NO: 476 - protein, 173 aa, Methanopyrus kandleri
VIGLQEGLQILQIVVGSVLAWLNFVIVDILMGLPEAPGVKGAEAIGRSVERRGGDIAGGYFMGNIVCSPDASAGTLLASSGYYCLGGPEGGLVAALAVYLGNRLCADPGYAGTLGSLTATVLVTLYDKVLGMDPANFVAGMVIAIMTIHGIDHPRASRLIGDIARRMGRGAEK

SEQ ID NO: 477 - protein, 97 aa, Methanopyrus kandleri
MKDPGLVAVGVAAAVAFGTALALGLPPIQRDKPRRKSWEVSAAFPTPVIAAGATVLVIRVIGYHPPIPLAIVGAVVGALSAAFTAYIEKVFPRPEAG

SEQ ID NO: 478 - protein, 357 aa, Methanopyrus kandleri
LGGSRSGGFILSKIIMRPQVTIEDDWIIFEGEEGFVRLPKDPYKVIEDFEEYGYFFDEEHRRDFAAMYMTLIVEQTPVLLVGPPGTGKTKLVRLIGELYDVPVVVMRGHQEAREQEFIGGVDVAALPVADKIAEEYTEVGNMEYEEAIEALKEFIYVGGYLKDVVNDARRRGACLFFIDEVNRFPGYMIPTLIHIFEKDTEVIYIPHSPIDFGETGAIMRIGALNPEGKGTTNFDEALLRRVELVPWGEYDVEIYKRIAIESARQIIELTKMAEEVLEDLASLIKDMGKGVDVAKDVAQTVAIGIKMGYDVDTVARNVANKILGDMLLDSEKAEEFEARRNALERKIKEKLKPVFKS

SEQ ID NO: 479 - protein, 447 aa, Methanopyrus kandleri
MDPNHVKDEVGQDPSDYTASLEQAQFVVEGIERRGKFRNPLLSTVQANDMIKSIPNLSDDQFRQQVRNLLRSTMGELEEWAKDVGQDVVRRVLEELKRAEEHGYYVPEELKERMEELLQDLQEGPEEREAEGDGEGPSAGASESPSFVSEEGGGGEPTEGESGPTPTESASGVGKGGDPAFTIDRSFPERKKFLKILQSESLKILDEGHEISREFEDVEEGEAKAHFGWLYGFDKADFLSDVDWERSLEEGYFKNVPLTLYRREFRNKDEPKVAILLDSSGSMSGDKMEVAATLAAALFETVGIENIGLWAFRSEVHQLKDFEEVINRRKLIEKILGIPAGGGTDPVKPLIKVLDSLENVDYDKCKIIYITDAIFMHDDFIRIRNLLSDRDDVELYALLIKDEFEHTGPTIFKRITEEFDGGVVQVNPRDREGVREKLRQFVDMISD

SEQ ID NO: 480 - protein, 199 aa, Methanopyrus kandleri
MRSGIRKFRVTHKTFMTRKMDDEMAVISFVDDRHYDTYKEYMERLKELEVSCAVGWVNSLGCEAFFPKSVESILENWHSVEAASQMIHAGVTDVVLLEHNYSKYLFREFHTKFRRSWEKEGISYRAPLGELYPDYVNEIILAHNFLRSLSMDVRGMINVSLHRDRMVVKTSRRECSVWYEDIREDAMETMQAVERALVG

SEQ ID NO: 481 - protein, 336 aa, Methanopyrus kandleri
MNCVGIAVSAIIFTSTAPEVPTNLRSKLLSSPSTTSNLSRPESSSSAILARWASDLRKGDMKGLLTQTSTVSSGNETRMVLRSSTTGITSKLTLNSRDNAESRGSMFAYMVKVLPTLLDAVVEEVNADKDHSETFRTEPWSGQPDEVVETRYIQLVRRLVGEGRNVVLVGEPGVGKSTTAIAACEKPVPIVLTFGGNLPVSILKTFVNTLRVTGPRRWISVDAVVVGDAVIEGKVRRLPLIDEVVVFSVTIVTWCLTRALKIPIIAMLATDKKYYAEARKILELAGFEVVEIKPDKHTVEEVLRAHGLQGSPRTDNPREELKRFSERSSNHSQSDE

SEQ ID NO: 482 - protein, 389 aa, Methanopyrus kandleri
MDEVSGNRGLISKTVNDLRDEGLIEPTHRGFALTEEGFLELVRPNTDYEYRNEPVRLSTDGPEVEAFLRVITGRSKTRTGSIVATTRCDMRCKFCYYNLVRDHVELTPEEILREAEKRVKAGNREVVIQGASPHTLDTDLVEAVELIKLELGVDVGVGTGPLIPLDLLEDLQRAGLDYLKLSLSGRTPEEWEAITGRRRGFEEFWRVVRWCHEHGLEVTFVGGVVGLPGVPPEADAERILSILALNPRKRIVQFNPAQDPARGPLSPLDRLELIYKTVRSKLPEDVLVKSCCISPMTWSPLYDIRRYLDKVVCMLGIECREYDGCPFTGRVLEQRIMNELYEKGSVSTEELARRLRIARSRLKRRLESMESRGLIRRTESGWTIARRTS

SEQ ID NO: 483 - protein, 405 aa, Methanopyrus kandleri
VVESSTTSWRRPVRGHRCTSTTRMLPVKAAREYQEAFSWFPDRVYVCYAMKANFNPYLVEHIVDETRAADVVSLWEMKVAVNAGAETVVVNGNAKSSDEIRAAVERSWVINVDSFEEFQRIEKIARHEGERALVALRVNPKVSPDTHSHIATAVEGSKFGVELEIAERVCRRMIESEWVEFLGLHYHIGSQITDLRPFSEALRSVRTFLEDTGLIEEISYLNIGGGLGIRYRRGEEVPSPHDLAEELQEDLKELHSESSGFDLYLEPGRSIVGEAGILVTSVRQVKRGRRRWVFVDTGMNALIRPALYDAYHEVVVHGGDYSATEKASVAGPLCESGDVLAEDRELPIDISEGDLVVFLSAGAYCESMASNYNCYPIPGSVVVRNGEITGVRRVQDYEAFSKTWW

SEQ ID NO: 484 - protein, 180 aa, Methanopyrus kandleri
LIVPGTPIHIHRLAKKIMMELDAFEGSRPLLDDVDVLIVRGMSRGEDWDLDNLQGYLESVLERCDVEVVDPESPEGKELIEELGKFVVERIQAQYADEEPVSVRPVENPMEAVDAFTQGEIFLDPLGFERLKRDLEALGCVAAYTFGRTPDDLGVFLAAWADRSGIGPKSVELLVANLKG

SEQ ID NO: 485 - protein, 325 aa, Methanopyrus kandleri
LRSCFPDVQSADPQIPAHLTRVGISGIKKLVKIPRRGKRSIVLVSTFNLFVDLPAHQKGIHMSRSHEVLQEVLEELEMSVEGSDTVIEDLCSRISRRLLERHDYATRSEVYMTGELILSRRTPVTKLPTQEPYKIIGRAVSKRTDNGIETRKMVGAEVVGLTACPCALEMMREHGKERVKHRLMEELDLEEEEAEDLAKKIVREDVHPMTHNQRGVGTILIEVSDVHRVSINDIIEIIEESMSAPTYELLKRPDELKVTCSACENPKFVEDCVREMIRRIVERFDYLPDDAVVIVRQVNKESIHKHDAFAERVTTMGELRKELGS

SEQ ID NO: 486 - protein, 1249 aa, Methanopyrus kandleri
VPGLPIKLRVEKAYPEDVGKRAVRMDKASRDRIGVSEGDLVKITGSKTTVARVLPAKKEDVGKGIVRMDKYERQNAGASVGEPVEVDRAEEKVAKRVELMPTERVVVPVQAGLKEEVEEELTREHEQDILEQIKRYLRSRAQQTPIPATHRDVIPLEVQGKTIAGHVLIKFPDSLLVVGIEPEDATVIGPETEIEVKPYSEDLAKAAEIPDVTYDDIGGLDREIELIREYVELPLKRPELLKELGIKPPKGVLLYGPPGTGKTLLAKAVANECGAKFYSINGPEIMSKYYGESEARIREVFEEARKNAPAIIYIDEIDAIAPKRGETGEVERRVVAQLLTLMDGLSEDERVVVLASTNRPDDIDPALRRPGRFDKEIEIGVPDKEGRKEILQIHTRDMPLADDVDLDKLAELTHGFTGADLEALCKSAGLKALRRAIRKIGAKLAEKGEKEEREVAVKVSELSDEELMEVLEKGLDRARIPEEKKRALRRVLREAEEEEKEEVAYTDALDKVLEAEELPEIREELKVTMRDFMEALKEIEPSALREVIVEVPDVSWDDVGGLEDVKQELKEAVEYPLKYPEVYEKLGTRPPKGILLYGPPGTGKTLLAKAVANESDANFIAVRGPEVLSKWVGESIPGDEVVWAKVDGEAKLIPIEDLYELWKEGRDVEVAALTEEGVVWSSVDRVARHRRRTGLVKIITRTGREVIVTEDHSVFTVRDGKIVDVPTSELSEGDWIVLPARLPAGDSDEIDGIKIDEDLAFLLGLYVAEGSLTNQKDAVRIHNKDPEVIEEIDRIVREKGWEGRYYESDHSYWIKSRKLRQLCEKLGTKAREKRLGPLLSLKPELLAAALRGYYTGDGSFSVKPHGRSAIIEATTVSKRLADELLVALQILDIVARRYECDDTKGSTRYRVMITKSEYIRTFVEKVGFAQSEKNERIRKFLAERKWTRGRSDIPTELIGSPYTYVEVEYISDRVAADGGLMKAELEHLYFDKIKEIVPLDRDDEYVYDVVEVKLGHNFVGGQGVLLHNSEKKIREIFQKARQTAPCVIFFDEIDAIAPKRGTEVGGSRVTERIVNQLLTEMDGIEATEDVFVIAATNRPDIIDEALLRPGRFDRIVYVPPPDEEAMKEIVKIHTRDMPLAEDLTVDDIVEILRRREREEDAKYTGADIEAVCMEAAMLALREVLDELERIEKESETEEELEARKEALLEELRVERRHFEKAVEKVPPSVPKEKLEEYEKLKEEYQRLAG

SEQ ID NO: 487 - protein, 152 aa, Methanopyrus kandleri
MLLRLCRWLRLLGYPTVAAHEVVDPTKVEDEDEVLVEFCREHDALLITRDRQLARRARAVLITADSVPEQIAEVLEFLGDEAFLDPDESRCPECNARVRRVTAENPGPFEVTWECPECRRKYWVGGHWRDMEETIDRVKKALRRVQRGHLRG

SEQ ID NO: 488 - protein, 207 aa, Methanopyrus kandleri
VGEKLTLEEGEFLVRLARKAIVHYLESGKKIEEKPPTQRLAEKRGVFVTLKKYPDDELRGCIGFPEPIKPLVEATVEAAISAATGDPRFPPMRDPSEMEEIKIEVSVLTPPKKLEVDNPKEYVEKIEIGRHGIIVRRGARSGLLLPQVPVEEGWDEIEFLSHACLKAGLPPDWWCSPDCEIYVFEAQVFEEEEPEGPVRERDLAEEQ

SEQ ID NO: 489 - protein, 205 aa, Methanopyrus kandleri
LIVMTVFAHPDDMEVHCGGTVRKLSSAGHRVIEVIMSKGNNGGDEEVREREAIEGAKCLGVDRVEFLNHEDGRISVDPESIDAVRALISKFEPDVVFTHSPNDTHQDHRRTFRIVTSAVSKFPEVTVLMGEGPSTVGFQPVVYVDVTDVLEKKLEAVRVHRSQVERGAISEEMVMKTAEFRGMEIGVKYAEAFEAFRISGSLLLG

SEQ ID NO: 490 - protein, 336 aa, Methanopyrus kandleri
LERIVVLIPAKHESVEAVEKPLRSVLSQKGVEIEKVVIAAGTEDDHRRFSRRFADDDIVEVVKAGGNVKGETVNNALKRVSARADYVFLIDAGDELGSDRYIRELLEEDATLAFGRIRYCGRNLTGLMVGLQFDVVSSGISFWGNVVGSAPVFTTGTLFKATFLLEEGLPENLAEDVTLGLIHTWRKVGFVYRPDLEVWMDDPASLKENFFQQSRWWAGMYQACAEALRSRNLPGIGFAVFVLGSLLASFLTTYILPLVYPWTILISLAGRMIYSVLAALECSNRRGPLWALAVMPCQFMWTFFVEWAAVYGLIWLAIRGNVWYRTTRASEGDDHD

SEQ ID NO: 491 - protein, 361 aa, Methanopyrus kandleri
LRAALALEDGTIVHGELFGSPREAEGEVVFNTSHTGFQEALTDPSYRGQILIMTFPMQGNYGILPEVGESDRVQVEGFVVRYLHDGPIHPRAEITLDEFLQDHGVPGIAGVDTRMLTRKIRTEGAMRGVLVPYEPDDQPSDEELLERVREVPHISEMDLVPQVSVREEYRFSDGKPEIVVIDCGVKRSILRELAKRGAGVTVVPYDTSAQEIMDIDPDGVVVSNGPGDPKRVRETVETVRELIGQVPLMGICLGNQILGLAEGGDTFKLKFGHRGANQPVKDLDKDRVYITSQNHGFALDPDSLRDTPLRVRWVNVNDGTVEGVVHTDAPAFSVQFHPEAGPGPWDTKWVFDEFLAMCREH

SEQ ID NO: 492 - protein, 350 aa, Methanopyrus kandleri
LGLGVALDIKEGKVVVRRSPDVREYIPISRRYDLPDDPHELATLLVERYDLDFVYVADLDAILRGEPADTSDALESLEKPVFVDVGACEPDLPSHAHRVIPTECYDDKSEYIEDLEEDESAVAGLDLNGSEILGPWDGVGDFLDTVVEVVYRRDPGVLVIDVGAVGSKEGPPYEAATSVGMYSTALIGGGVGHPEHVKLALGTPGVSGVILGTILFEGVDPMKLEQARREGKRLRVHHMGLEEEYLNLIKEGKKTVEGRVKDDKRARIKPGDKILFNRRLLVKVIDVREYDSFEEMLREEGLENVLPNVDSIEEGVEIYRRFYSSGKEKMFGVLAIEIEPIMDLWEGICD

SEQ ID NO: 493 - protein, 263 aa, Methanopyrus kandleri
MDVTILEKLYRNSGAEESLRTQVQSVISDFDAELEEIRKNFRAWAVLRIRGPEVEEAAEEIVEEFDTVRSLFDVSPGDVIYGRIVDLYRVGYGIYVDIGVVGPEVVDALVPLYRLREQLLDGEKASIRDIGRSFGFVENMPLEVEIVEVNEERGEIEARLTDEQVEYLLEMAADPYDRMIVAGITRKRLQRILNRAGFGRRVIRIERWGLLENEVVFDEGVDAPGVLAKIGPYLRGGEVELIYDDKFLERIGFIPSPEGPILE

SEQ ID NO: 494 - protein, 173 aa, Methanopyrus kandleri
LRDPIRDLERVGCPEHVIEHCKAVCRLAEEMAERCEEDVDLNLVRTGALLHDIGRARTHGIDHAVVGANIVSELGYPKEVVRIVERHIGAGIPKDEAKKLGLPPKDYIPETLEEKIVAHADNLTFGTEHVPIKVVVRKFSERLGEDSPAVKRLIELHNELVDLNAIPPELTRW

SEQ ID NO: 495 - protein, 193 aa, Methanopyrus kandleri
VGGSNVYAELGEEDLEVLRDVTLSLLDSEKGVDPEVAKRTVDVILKREAIDEEIAEELGVDPREVRKVLYKLHERGVVTFRKERREEYRYPVYSWRLNLREVLRRCLEERRRELEEVERALSNDMSHPMFHCGNDDCPRMSFEEAMEHEFRCPKCGEVLEEVDLTEERRELERLAEELKVEIRRLEELRERLG

SEQ ID NO: 496 - protein, 230 aa, Methanopyrus kandleri
VLRLPEFLVFIDHPSKKEVPDSEVEVARRRVEQLGGKIVWSIAGSIRKYHPDVRYVERLRKEGYELALHLSPGYIGLHRTSLATGVPEGKIKEAVYDALRIVDGAKYLTTCGPLHTALFRGKVPRRGWKDDLGPELHPSVVYGLGQAAAETGLDLLVGARSPEWIKGILDELEVKYIEGIGIDNYTIDDEKPEEAAKMVAEGECSAVIVHPRKDTFRRLHKFITCLKRIQ

SEQ ID NO: 497 - protein, 724 aa, Methanopyrus kandleri
LTLDERDLELIREELGRDPNATERAMFENMWSEHCAYRSTRHLLRQLPSEADHVIVGPGDDAAVVAIDDEWAVVVGIESHNHPSYVDPYNGAATGVGGIVRDVLSMGAFPIALLDPLRFGPLDGERVPYLVDGVVRGISDYGNRIGVPTVGGELEFDPSYERNPLVNVMCVGIVRRSEIVRGRADRPGDVLVLVGARTGRDGIGGAAFASEELGEESEEEDRPAVQIGDPFTERQLIIAIREAVERGLVKGCKDLGAAGLTCAATEMAADGGTGVEIDVFKVPLREEGMEPWEIMLSESQERMLLVVAPEDVDEVIEICRKYGLEASVVGRVTDDGYLTVKDGDDVIARVPAEFLADGAPEVEWEEEPYSYPENVDVPEPDPEDLVRSVLSSPNVSPALREWVYRQYDHEVQGRTVVKPGHDAAVMWLQHEGLEDVALALTTDSNPRHVLIDPKTGTEGCVAEALRNLATVGAEPLCLVDCLNFGSPENPRVYYQLRRSIEGLGKAAREFEVPVVGGNVSLYNEHEVDGPVNPTPVIGAVGVIRGLDYLEDFPREPEEGEAVIVLGETREELGGSLYLIEYHGIKGGKVPRVRYREERALHDLLRRIARKNMVSSVTDVSTGGLLAAVAELLGPVGASLSLSEVPNSVSRWDFLLLSESHGRAIVTTDRPDDVLGAAEEAGVPAQVVGEVTGDGVLRISVGPVDVSLDREELEELWRSPLHYLE

SEQ ID NO: 498 - protein, 308 aa, Methanopyrus kandleri
VERIRARLNLGETLLEWERVLARCDGCGACESRCPNDVPRRLFNVLAASGRFEEALSVASDCTVCGLCERLCPHNIPYTEVITDLRREEPTPEAVRRVRRTGTPYGRKLADESEPLQGDGVAILGCTIRSRPEWLRRVIEIVRRAGLATLGEDEPCCMNFARKRGEEVPEETVQRWCSLFDDFDTVVVFCPGCYDFCVEVLDERPLYYAEIAEFDGIPEGAAYKSPCHLVRHGVDDHVLERLPDVELPPRRHRCCGGGALVRKPSESTVRAYERLGKPVLTPCPMCVTTLEGVIDVRPLWDHVVDLSR

SEQ ID NO: 499 - protein, 484 aa, Methanopyrus kandleri
VPCKVRIRGIYSTALTKICLDHGFIVTQPSDDIRRRFPDAEFDSGSPDVDVRDTRNRHGIEIQGPADDVRELVDILQSEVWATVTADKIGEGSVFKGVVREIDDRAGVAVVDLGNGLQGFLSEDESEVVEEGEELVVQVAKSVSDGPLKLTTEVTVAGEYAVLVPVEGIRVSRKIRDERERERLKRLGEALVPEGWGLIWRTAAEGKSGEELAEEIDDLIEERKQLFKRAEEMSEPGPIRDVREMELEIHSLAKSRLDSVRSEVLPTMVGHHYFKCRSLAGSVAVDTVEPFLDDLDEEVVAERLIRCLTRSEGPSEGDRIDIVHVKPGQGVKKLGGNPKVVEYDPVEGILKVRREMRGPGFYDGIDKPIEKGDYAISILPDGSMVTVHQYFNKDGELKGRYYNIGTPLEVFKNCVRYVDLEVDVVEPEEGEREIIDEEDLERAVDSGLIPEELAELALETAKRVEKRGMKEVKPYPVWKGFEHG

SEQ ID NO: 500 - protein, 100 aa, Methanopyrus kandleri
MGDPEVLLEVYEVIRNRIEERPEGSYVAELTEDDDTKPAINKICEKIIEESGELILAAKDGDREGVVYESTDLIFHVLVLLAYLGIEIGEVFDEFERRRK

SEQ ID NO: 501 - protein, 448 aa, Methanopyrus kandleri
MERVVIVGAGPAGLFAAREVALRAERDVEVVVYEQGPSLEDRLESGEVMRGVGGAGGLSDGVLNLRPDVGGDLVSIVGDKRSANELVEYVDEVFLKHGAPKELKVPEGPKVEEIALRAAAADVEFVRIPQRHIGSDNLPKVIGSLVRELEELGVKIVPETRVERILADECVRGVKLEDGREVEADYVIAAPGRVGANWMMHEAKRLGLGLRYNPIDVGVRVEVPRIVMEPVVEVSLDPKFRTRAPTYDDPVRTFCVCHGGYVVKENYEGFVGVNGHSYRRKKSENTNFAFLVSVDLTEPVENTIEYGRSIGRLATTIGGNRPIIQRLGDLRRGRRSTWDRINRSHVTPTLMDVTPGDISMALPHRVTVDIIEGLERLDEVIPGVASDSTLLYAPEIKFYSARVETNEDLETRVENLFVAGDGAGLSRDIVNAAATGVIAGRAVAERIG

SEQ ID NO: 502 - protein, 314 aa, Methanopyrus kandleri
MEPIFQTLLALLIATQTGVEHDTGCCTVLVHVHHGCDVVAYRRDAKFPAEILIVRTEWAGRRAIKEYKIQGGYFCHTVITEDGWIVTIGGRDIPEVNRKLEKLGAEIVSKGRIKKDEIEKAGELLKEARWGHFVVKSPNDIVGVASYDYRISSPERIDMFKIKDGEYVKVTNNPRYYDRGRSEEFGKNPIDAAIKIAGKDPYGLHRRDIITYKLTVDETSSSVKVWASYDGRALLGGASGEPDPIRFMGKTIAANEIPRVPRRKPLGEVILRVCREHEGKGELPNPAAVAAALISGAVFVAFLGQLSLQQRNLY

SEQ ID NO: 503 - protein, 337 aa, Methanopyrus kandleri
MNGKILVVTGVAVCLVLATGVVAFNPANKVKEFDPKHALNFAKNICKLGPRYGGNEAELKAANIMEAELKKYGLNVHEEKVDLGGGKYTYNVIGEIKGTDESNKYVIVGSHIDSPGFCEGATDDAAAMGIQVEMARVLAKNFRPKKTVLIIGFGGEELWFKGSEAFVRKHPKIIKNCEAVIDLNCVGAGQNVFLTQKSAKPKPVEGDPKLIKLLEECAKELGHPVTVGDTTYPSDTYPFYHNEIKRVPVCQVMSQPFEVPPWSESNTADKLDPKDMEKVGETVTLAVVKLTNAEPASKPLWEAKRAEESAGGGWPAPMWWAPALLGVAAALLRSRGR

SEQ ID NO: 504 - protein, 177 aa, Methanopyrus kandleri
LRALLIVDMIRDFVEEGAPLEVPKARRLVPRIARLADEFRERGDLVVHVWDEHYPDDPEFKVWGEHAVAGTEGAEPVEELKPEDGDLVVRKRKYSGFYGTSLDYDLRSRNVKEIYLTGVCTDICVLFTCADALMRGYRVYVVRDCVASLEEESHRFALKHMEKLGAEVVDSEEILGD

SEQ ID NO: 505 - protein, 456 aa, Methanopyrus kandleri
LTAVKRILALVDGEHYIPVTREALETVEELDLGELVGAVFIGGTEKISEPEAVKRELGVRVWLSESEDEIPVDMIVKVIEEEDVDVVLDLSDEPVVSPDNRFEIASAVLSAGAEYWCPDLRLKPVEFHDVLEKPSLRIIGTGKRVGKTAVSAYTCRVLNARGYNPCVVVMGRGGPREPEIVRGDEIELTPEYLLKEAEKGKHAASDHWEDALLSRIPTVGCRRCAGGLAGRTFTTNIVRGAKIANELPADFVVVEGSGAAVPPIKTDAGIVIVGANQPLEHIGGYLGPYRIRMCDLAIITMCEEPMADDAKIRKVERTVREAGDGIEVVLSVFRPKPTEDVEGKRAMFVTTAPEEVVSRLVEHLEEEYGCEIVGTSPHLSNRPKLRKDLEKYIDDADILLTELKAAAVDVATREALKAGLGVVYVDNVPIAVGGDYDHVGDAVENVAELAIDRFEG

SEQ ID NO: 506 - protein, 77 aa, Methanopyrus kandleri
VRKKLPVAPFDRALRAVGEDVRVSRKASETLRDHVQRLAEEIGKRAGEIAASRGSRFVERVDVERAFAEVVFGIDSD

SEQ ID NO: 507 - protein, 260 aa, Methanopyrus kandleri
LTKVLVEPDPEEVKQLSEALGRQPVILAGICEAEYRGRAESVAGPALRIAMCKPDGTFILHNAMEKREPTNWNPAPSRQSIEVRDGCVVLRSRRLDVPEEVVVYFHKVLLACSLPKEGAKSEDSVFSLFRSEEDMKRVIREDPSVIEPGFRPVGEEVECGAGVADVVGYDEEGRFVVLELKRTRAGVSAASQLRRYVEAFREERGEEVRGILVAPSVTDRCRRLLEKYGLEWKKLEPVPLRDDGGKKQCTLTEFLAGEGD

SEQ ID NO: 508 - protein, 216 aa, Methanopyrus kandleri
VVRVKICGITRPEDAATADEAGTDAVGCVVEVPVSTPRKVSAEHANEVFSVVSPFVSRVAVLMDNLEPIDRLEEATAVQLHGTEDPETCEELSELGLDVIKTFWVDQRGSVWLGEELIGDEVLAEYCEIVDAVLLDTKSAEGGGSGERHDWDASARLVRRLDVPVILAGGLNPENVREAVEKVRPYAVDTSSGVEKEPGIKDPEAIAEFVRATKSV

SEQ ID NO: 509 - protein, 1299 aa, Methanopyrus kandleri
MPVTASSQLQFHTPDAGVKPDVYWADFLGYPTGALFREVIMPDSRGEIVTPPTHLGGEPYRQNSEIVQKLVERWEELSEKPNDRKVIALVYYDWPPGRESIRASGLDVFGSLVNILANLKAAGYNVSTPWDDQLLKIVQLERERRWDEAAALVRNLSQELARMIELYGVNVGWWHGDYLRAMYDRHAYLATIPVSEYLKWYDQLPEPVRLYVEYGIPGLLYGYAEPLHRPLEGEALETLSRNLSAMLRDIETLLSNLGVPDTTDAMKALRELADALLRYAAGKAGHDELERAFRRAVDLGRKLEQRYHTGIFGWGPPPGDVMVVDNKFVVPGLKFGNIVLLPQPPRGLLWGMAAYHSLLLPPPHYYLAVYLWLKHHVDVIVHVGAHGTLEWLPLRRTFLSHLDFPTVLLGDVPHVYLWCPTSGELYNVKWRTSAVVLSYLPSAPSTAYDFYLNTLVKLLHSCFHVFEGNPEVEEKLKPVIMELLKRTRVYEWMGLTWEDVERMARTDFNRLVSELHSYLHMMQAHGESPTPVQLTRHLHVYGLVTSEEIREYVSALLFRKYLELVSKTYGGDLESILSPENIEKYGDKALELFDLVWKEWQSLIDHPSELRFRYPELYREMERIRDLVVTSAKLEIENLLRVLDGQSVPVGPPGDPTVDTSVLPTGRMLCLLNPELIPSETAWMLSDGITLKQRTLFVLSAADVLNDRGLSLAVLLRSSGVDRVGERYVLSGSPVYSPVLVCQGLEAIFAQTPAGRALLKAHVEAVLRAPKDLFAVANLLKTLSDECEDPELRESLASIRLDPGLLEKGLVVLRKFSASLGDVDVRPTFRPDSIWYAAWAVKFLYDVQVNGTPIEKAAIRAALGVYCPADYTLGVKAATERLKPEEWEILARSLSAKLENVLTPEGSESAPGLLRIDLLIVDAVLKPVTDRLWGVLAEDAIEFYGGLLAVARLIRAGLPDPLVLDEVSSLCIRQLAGELSREWHSLWMNKDWLLSLRTPGEANDFLERVSRLMAWMILLGPTIVKPTTMAERAIAGVLGQLFFELVQRLVFDREVVEHLEKLNPYVVESIAGRVFVLLDSDFGLQLLRRSYHYQVLCQLGKLEEAEKWARRFRETARRASLETFRRIVSKYGPCGCLAIVLNPVLRGIVEELAPAAELLVPNPFSAGVSPVISTVSNSSVGRSPAVSAARARGSTPKFTSSAAGTTATTTGVRGSPSNRPRRVEPVPGISLSGGSPARSVSVGSTGSAVSAKVLKRQGGSAGSPVPPILRYLVMAAVVGTLVCWLVWMRRASVPIKPTW

SEQ ID NO: 510 - protein, 429 aa, Methanopyrus kandleri
VSRLYSIVAVATMVLLTGAAADLQEYKEAYSAAAKIEEYGEKVKESLNIIGGFQPPCGLKVIPTAYPYMAFKDDKDAISKVFQGTDVAESGSWTEVGPGDFRALIYGIHELGENWFERVKVVADLAQKPADYALKVHEETHAWEGAVEKVGETWEDWENHKGDENLKTAIASRVLAVLGLVVSENWRAIFNEVNKAAQIAENVGRVTIPAGVYGNDSPIELDFSKCESPEDVVNVIKAAFGDLTPDRVIELIDSEAKYFGLGDKFVENYMEGGQYQPHEGGFTVDEMKDVIEKFKSGKDIYGQELSEEALAFAILFNIEDVWATYEEYVHQYGHFFPPAESDLKLACDKIEENAKIVEDVLNKLNAWADVGITKAEFESNPLECAPAVKDWAVGELFGVVEKLEKRKIPLSPVVVLAGLLAALAVLRRR

SEQ ID NO: 511 - protein, 424 aa, Methanopyrus kandleri
MVSPFSIQPRPPTPIMLIRGCGNTSLTHDKVLTFVVATLCLLGAAKADLVSDVQQRCEQAVDWLLTNQQPDGGWLYEGYGDKSSAMDTGVVLLGLCEAYDRLPQDQQCKVREAVDRGVEYILKCWDGDRKMFWDYPDGGGKEEYMPMYTVHALMGLIAVEKKFPDIAEKHGVSKYIDEALEKLLSMQNDDGSWSNFGPGSWSSPGRCTGLVVWLAEWSGRYGPSDERIAKGLKYIENHLEKSPLGGLISSNGPKIDFTVWDMLAFYFSGDEYYRSFVPKLQEGVLGFQHKDDEFAGAFAAHTSVYDSEYGPEGTAAPCPHKTARVLFALMLTGADPNDDRVKKAVEFLLNTKSQSEGAWFWPTMNDPSKPDNNPMKAYCTGWCLAALGAWLQKVPAKKHGIPVSPLMVALAFIPARRAWQAGTP

SEQ ID NO: 512 - protein, 346 aa, Methanopyrus kandleri
MSEALQRLREFAKQVLKCVEKDEPVRIPKRTTSNIRYDPEREIFTLGPDKLERRPRTLKGSKKLAQMLSVAAFAKELVEKGRSATLREIYYTSEGWEVDFKDQRESDAIVEDLEATLGLKREEFGVWPEEDGAAVYGDLLVREDGVEIHAERAGISGYNIPPNVDAVEILDCGAERVIAVETMGMYRRLVQERAHEKLNALIVGLKGQAARATRRLLRRLNEELGLPVYVFTDGDPYGWHIYMVIRSGSAKAAHLNEELACPDAKFIGVTATDIVEYDLPTEPLKKTDYKRIEELRRDPRYYDPFWKKELDLLEKLGKKAEQQAFAKYSLDYVVKEYLPAKLDELE

SEQ ID NO: 513 - protein, 202 aa, Methanopyrus kandleri
LAELADEFYESAERVKIPKDRIGVLIGKDGETKRYIEEKTGVELRIDSKTGEVEIRPTERVKDPLDLIKAKECVLAIGRGFSPERAFRLLREEDASLEVIDLYELVGRNPKALERQRARIIGREGRTRQLIEELSGADVSIRGKTVALIGTPRQLQIARKAIEMLASGAPHGRVYRFLEDQRRKMKREKLRLWKDSEPPDIL

SEQ ID NO: 514 - protein, 263 aa, Methanopyrus kandleri
LTLSEDKYFSAIEELEPKPGKVKRLEKTLEDLKVEEEVFDQYTLMTLYELSRRGYIDGLMGFVKTGKEANVARGVRGDELVAVKIYRAATSDFRRMWRYIRGDPRFKNIGRKRHRIVYAWTEKEFKNLTRAYEAGVRCPEPIAHMNNVLIMEFIGDDEGNPYPLMKDNPPEEEYAEDVLSNILDDYRRMYRKAEIVHGDLSEYNILYGGKGDYRIIDFSQGVVLDHPIAEELLIRDLRNLIRFFERLSVDTPTLEEALEYVRG

SEQ ID NO: 515 - protein, 111 aa, Methanopyrus kandleri
MGKRIDDETLKKIRLPKEGEIFGVVEKMLGNDRVQVRCVDGKTRVARIPGKMRKRVWIREGDVVLVKPWEFQPERADVTWRYTRVQVDWLKRKGKLDERVTKLLEEIIPGA

SEQ ID NO: 516 - protein, 324 aa, Methanopyrus kandleri
VDVEERLKLVTRNAVEVVTEEELRQLLEEKEEPVAYVGFEPSGKVHLGHKLVIDKMIDLQEAGFHVIILLADLHAYLNEKGTLEEVRELADYNRRCFLAMGLDPNKTEFVLGSEFQLDEDYALDVYRMARHTTMRRARRSMDMIARSEENPPVSQVVYPLMQALDIVHLNVDLAVGGLEQRKIHMLARDVLPKLGYDSPTCLHTPIIHGLDGDEKMSSSKNNFIAVDDEPEVIREKLRKAYCPAREAEGNPILEIYRYFIFREYDEVTIERPEKYGGDVTYTSYEELERDFVDGELHPLDLKENAAGYLSEILKPVRKAVSAPS

SEQ ID NO: 517 - protein, 354 aa, Methanopyrus kandleri
LICHRCGREVDTTIDGLCPECYLEEHPMIEVPEGLEVRVCAQCLARHTGLRWEDPPEGVGSIEELLVEYVLRELEENLRTLPDVYVRIKPLEVKGEPGGPGARVLVELLAEGEWEVGGEVLTRKYHLKVPVVFALCDRCMKFRSGYYEAILQVRSLRGKLTEREREEVENFVTEAAASLLERDPMAYISDVEYPEEGIDFYIGSLNAARKLARRLVDAYGGTVGESHKLVGFDRERSKRKYKAAISVRIPHFRKGDILLVDGQPYLVTGLGERCSLRHLISREVVKRKWEELKGVEVLKPEPAVVIEDTPPRVVLERTGETVECYESDVDLHVGQRVYVILLKGVAVVVPEEYL

SEQ ID NO: 518 - protein, 372 aa, Methanopyrus kandleri
VLALNVDTSLVENLVYFIVSIILFWLFIRVYYQVVLFRRIEGEVERIRKIDEKVQQMVVRRARCDREEAETLVQRAANLFVVQPVQLDPHGIIERLENLIERSEDKFRSYARVLTGKRDGVEVDNMSMALTCVFSIHVIAQYLRHLLLSAKKTNNIQLLLLITMLLPTFKQFVKSNYEGAKAFLKCVPIGDSVGPMVAARLIGDSPVREVEKGTVAAEKELEGRRLLIVKAHGPGGNLGRLGRAVKKLVREYGDVSKIITIDAALKLEGEKTGKVSEGVGVAMGDPGHESYKIEQIAADEGIDLDAVAIKMSATEAVMPMPKSVVDAVEEAAERALELAKEAPEDSTVIIVGVGNTVGIPDNRPYVSNGGEG

SEQ ID NO: 519 - protein, 234 aa, Methanopyrus kandleri
LDVRVVLVEPKYDGNIGHVARVMKNFGVKELFLVRPRSELGEVAIARAMHALDLLENAVIVNTLEEAIEDVEAAIATTAVLASTPARNPMMPWEVREAFSDYEKIAVVFGPEDRGLRTWEVELCDATLHIPTSEEYRSMNLSHSVAVVLYELKKMEYVPERYGRAATKREKEVLVKSLDDLMKALNFDSTRRENVCTTFRRFLARARCTDKEIKALLWIFEKAKRRVLGVKRRN

SEQ ID NO: 520 - protein, 643 aa, Methanopyrus kandleri
LLEGMVVNEFRERRTNYWDGEVEIETEDGKLKLRMPGTIAGWLTKGTRVRVHGADGVQSVDVFKDDVEVERRYEDEWVPVWPPFEMETEVEKRDTLGRGVYEYRLRAREAIYREDFEAIVGLEQYHYASDKDVVAVWGCNECGRSIRANLKPEECPGCGSSRIELRTIRGSLPASRFMVVELLNGEEYEPDVLAYVRVDPPIPKLNRRLDGKVERNIREKVFGKDWFHPTFEPKRGKTIEDILSACDTKAARIARVVVHPEYRADGIGRASVQAAVRWVKERRIPEMKSEKHLIEVIAQMARYHPIFESVGFVYLWDTGSGRPYLVRPLSEDAKRKVSRFIKTDKIARQHGGRLYRSRLRKLEVEPLDGPIKVKRLHKMFSTELDVKGLPKDVVKLLEAFGVLHRKIQQYALQDVNLRIEPGELVVVVGPSGAGKTTLVRMIMGAHEEFIENVRRRIIRELSTPVVSRALSSMGTNPKEVADKLVKEMYQPDKGKVSLPENTELSAMIPGEVEPEIDPGVTIIEDLWSVTGDVNVAVEILNRSGISDAVLYRSPYERLSPGQKERVRLARMIAEGANLIVVDEFCSHLDPKTAMRVARSFSEMCRELEITALIITHRAEVIDALAPDKLVYVGYGLVGVEEKS

SEQ ID NO: 521 - protein, 149 aa, Methanopyrus kandleri
VFERIMVPTDGSENAKQAAKAAIEIAKKEDATLIVIHVIPLWSPLGTKPSFTLPEEIVKEAEKIVNEIAEMAKEEGIDVETLVVESPSVVQGIVEEAKERDVDLIVMGTRGLSGVKGLILGSTTKGVLSRSPCPVLAIPPEGEGEGEEG

SEQ ID NO: 522 - protein, 128 aa, Methanopyrus kandleri
MARRHFEKLDEKRVREPVGPNKDCEYYPCHFDGQDCTWCFCPLYPCLDEELGEWIKTKNGSEVWSCKDCHLIHRPEPAKVLLRELLSVGNGSVLRGAERLEEDPELKEKVLESVKRADRKHRQHSSRR

SEQ ID NO: 523 - protein, 148 aa, Methanopyrus kandleri
MSVKPKFANLILDGVKNVEVRRWLPGTILRERTCIVYASSPLCAVLGEVTIEEIKKVAIQSEEDLAEIAELAKASEDELRRYLEGRDHAYLITLDGPVRYPNPLPLEDLRRLIKERLNMDFHPNPLFRVDQEVLNVVRSAVGVSDRLF

SEQ ID NO: 524 - protein, 349 aa, Methanopyrus kandleri
MAEVSFGIELLPDDKPTKIAHLIKVAEDNGFEYAWICDHYNNYSYMGVLTLAAVITSKIKLGPGITNPYTRHPLITASNIATLDWISGGRAIIGMGPGDKATFDKMGLPFPCKIPIWNPEAEDEVGPATAIREVKEVIYQYLEGGPVEYEGKYVKTGTADVNARSIQGSDIPFYMGAQGPIMLKTAGEIADGVLVNASNPKDFEVAVPKIEEGAKEAGRSLDEIDVAAYTCFSIDKDEDKAIEATKIVVAFIVMGSPDVVLERHGIDTEKAEQIAEAIGKGDFGTAIGLVDEDMIEAFSIAGDPDTVVDKIEELLKAGVTQVVVGSPIGPDKEKAIELVGQEVIPHFKE

SEQ ID NO: 525 - protein, 196 aa, Methanopyrus kandleri
VRSVSVGEVARRDVITGSPTETAVEIAYKMREHGIGSVVIVNEKDEPIGIITERDLVIKVVSQGKNPDEVIARDIMSQPVITVEEDMEVNEAVKLMVDKGIRRLPIVDDNGKLIGIVTMQDILQVEPYLVATIEEEMKKFQEELEELEEVSEIIEGVCDLCETYSEELRFVDGVWVCPECYEDILGREIEDRELEE

SEQ ID NO: 526 - protein, 278 aa, Methanopyrus kandleri
LPDTSVMRLATTNVVSMPPTATVKSAVDTMIRYGFRRIPVTEPGELELVGIMTGKDVLDYLVGERRKIIERRYGSTFLPALHEPVRSLMRTEVYVITPYDTVRKAVRTMFEFEVGALPIVKDKKLVGIITERDIMADLYDVLEDTRVEEIMTEDPETVPSDITVLEAAEIMVDREFRRLPVVENGRLCGLVTATDVLHHVSSMATETSPDASVEEVMDVPVEEIMTEDVITIEPDVNIEEAALTMKGANVGSLVVTEGNDVIGIITERDIMYAIAERM

SEQ ID NO: 527 - protein, 727 aa, Methanopyrus kandleri
LDRKDVLCALVAFLVGAVVSSPSLDYGWNWFPSGADARGHMTKVWMLEKLWSMGDVPYPKWSEYWYCGYPFLWFYPPLAYFIPALMTHLAKTDVLTAWKWWTWLAYSLAGPSVYASARLMGASPLGSLIAAVAYQTSYNHIEITFTEGRIPTVAAIVFYALVPGLLVAVYRRVWERGRWAGYLALVLSLTILMHHSSGLAAITVCLAYVALRISRSWTLWAVGKEELPSILPEVPGHAWVLFAILLSVLAVSWWLMPALEYRTYSYTTKPKWWISMSSVHDPWEFFVPDYWKTRYAKYVGAIQFLLGWAGLILAARRRPRTFLPFAIMTGVALLLSFGLVLQKPMERIGFEPKWFLMFSAVILCTFVAFVVDNFRFLRRHTVLIMICSMMVVDAAIGLKYAYRPVHYTVSELSALLWMREHTGPWDRVATVGYRALWGMEPYITGAPSVFGWYREGTPIRDVVVQYQRSFKRVEPNKALKIGDVLGVRFLILSSRKPYAKRMITELERVGVRPIRDYRWVKVYEFNPTMGYEIDDIKSVFLGNKYRYMRLCKLLRYDPKYAPAYAFTRIPDCDLVRYAHPQVVVMDRHPSPEEVRVLKEFGVKEILVLDRYHKFKTKIFGINIVHDRPLRIVKMLPKRNLKPIRVDLGHAWFKVYGRGWVWVKVPYFPCWIPDRGVRLGGIDNMILLRVPSPTTVKFVWNPHPLWIALSAFSLCVSLYLTFSRQWRT

SEQ ID NO: 528 - protein, 386 aa, Methanopyrus kandleri
VADPSKDVKKLSMILESEEWRVEKAIERGTIRRVRTSFPGFVYYRTVREFAGFERGTLIVPSHGLLLRGFPKIERALLLEPALRSRFGEVGKVIVEEKMNGHNVRVFELDGEVYAATRGGLICPYTTHKLRNMFEDELKQFFEDYPGTVVCGEFVGKENPYVSREYPEARDVGFFVFDVRDPSGRFWSYEEKLKVDEYGLERVRCFGEFEVSEVEEIHRIVRELDREGREGIVIKDPDRKLPPLKYTTHSAHVEEIEWAFRFAFDLGRDFVLTRTIREGFQSFEWCEKDRELKRRGAEIGRAIVEGLRRAVEQVVEEGEAYEEIPLTFESREWFERYEDFVKRVTGGTHSLKIIEEKEDGTVRAVLRKRYFGTGDKVSRILEEGVL

SEQ ID NO: 529 - protein, 158 aa, Methanopyrus kandleri
LIEVEIPGRGELRLEHLVLDYNGTIASGGKLLESVVEPLQELTEIVHVVVASADTYGTVEDELNDAGLDIEVYRVSAGNEREDKAELIEELGPEVCAAVGNGANDELMLRRAALGICVIGPEGACSRTLLNAHVVVREPREALELLLDPKALRATMRC

SEQ ID NO: 530 - protein, 426 aa, Methanopyrus kandleri
VLALRVLLKGKILIGGRVREREVLAEDGWIVKIGKRLNEEADLTLELGKRELAVPAPIDLHVHCRDPHPDYPFGFKTETRRFLLGGVATVVDMPNTRPAPTTPETYYEKEELARENAEIEVIVAGGVRDSQCTKELVEAGAYVLGEVFLATSTDAPAVPWSTLPEIFRELSPDGPLTIFHPELDELVAERPARNLYEHLKNRPPEAETTAVGLLAGLKVRYPSRIHLSHVTLPESVKIAKGADITVDVTPHHLFFDVLRVDPEDPVFKVNPPLRGRHHRLGLLRAVRRGDVDVLASDHAPHILEDEFEDVPSGVTGGEIILPAALTLHRRFGLSLRDAVAMITCRPAKLLGRDDLGEVAVGKRARITVVRMREFVVRAEEFGEEDRKFPYDGMRMFGEPVKLIDGTKVYDLKESRREGKPVILEGE

SEQ ID NO: 531 - protein, 565 aa, Methanopyrus kandleri
VSELPTGARVLVECLKEEGVEHIFGYPGGAVLPIYDEIYDEVSIEHILVRHEQGAAHAADGYARVKGKPGVCMATSGPGATNLVTGIATAYMDSSPVIAITGQVPTTMIGKDAFQEVDAVGVFMPITKHNYQIGKPEEIPEVVKEAFKIAITGRPGPVHIDVPKDVQEAEVDVEIPKTVEVEGLNVVKRGHPVQIKRAAELLAEAERPVILAGGGCVISNATRELIELAELLGAPVATTLMGKGAFPEDHPLALGMAGMHGTKAANYALTECDVLLAVGCRFSDRTTGDPSGFAPEAKIIHIDIDPAEIGKNIPVDVPIVGDAKLVLRDLIKELKRRKYLRERKRWGERIEELKAEVEMPPESTESDQRISPRELVRVLHEALKDRDYILTTDVGQNQMWMARYFPVEEPRRFISSGGLGTMGFGLPAALGAKVAAPEKTVVAVVGDGGFLMTAQELATAVDNDIEVKVFVMDNRLLGMVAQWQRLFYDERLSESKLDEKTDIVKLTESYGAAGITVEEPSELESAVEEAFETPGTVVVDVFVDPEEIIPMVPPGGELRDILGEK

SEQ ID NO: 532 - protein, 128 aa, Methanopyrus kandleri
MDFEEYLEKWFKGETTEVGIYMAMAIVAREQGYPEVCDLLEQIAMDEARHAAAAALIAGKVENSLEGLIEKMEEMIEGEKNAYETRMDEADHHSDELDDEIITLLKATAYDEKHHRKMLKAALEKLKE

SEQ ID NO: 533 - protein, 256 aa, Methanopyrus kandleri
LRYVDAHVHLDVRSYEDLERMALSGVRTVVTCAHDPYPDMTAEVYSALFRRLLGVETWRGEKAGLTVKVAVGVHPGGVPDNMSDVLREVEELLSHEDVVAIGETGLNENPDDREIQVLEAQLKLAREHEVPIIVHTPSRNKVEITEKVLEILNSSGIDPSLVLVDHASAETVSLIGEEGYAVGLTLRPGELDVWEACDIVEEYADEMTLIASSDLGSLAADPLALPKLALELERRNVEKSIIRDVVARNAERFYGL

SEQ ID NO: 534 - protein, 264 aa, Methanopyrus kandleri
LRTNVYPRGCEDRLRFAALYSHQFGKRMVANLLNEPGHCRACGPVCDGCKYDMYSLVDSLVAVEELPKPEELPPFVDEPEDHLPELPPVDVLVAIGLHPDLLVALSEVYEIKALIVPVEEPDWIDPWIEEKLREVCEENSVELTVARPGCDLEPSGPVTEAFCDAGMIGRPKLFMKVEDGVVIDVHVVRSAPCGCTWFVAKRLVGVDADPEEVKATVSEAHHSYPCTASMEVDKHVGDTLLHVAGRLHIEAALRALEEATDTDA

SEQ ID NO: 535 - protein, 142 aa, Methanopyrus kandleri
LHARCRCHTVKPTGANLRPLMKYIVAFRPGVDKRSLFRAVYLLDKAFERETGRPLTGTEYGHCMLLKAPYFSVDVKEAIFDLLRRGEIELRPERRNGELVSTYYPVGYRAEDIEDDVRREYSLHGDKWRLFREVLERVLGGA

SEQ ID NO: 536 - protein, 638 aa, Methanopyrus kandleri
VEEKRSSCPYADEAVCELVEHAKELNEEIPEIETPHIRWPVQFPKCPYGKQGVWCNICSNGPCRITEKTPRGVCGATADVIVARNFLRHVAAGAACYVHCLENAARALKSVADEESPYEIADEKALRHAAEVYGLDTSGKPEDVAEEIAEFILEDIYRPRYEESEVFKAVVPDWRIEMYEEMGLIPGGAKSEIHDALVKTSTNLNSDPVDMLLHVLRLGLITGPVALFGVETINDILFGSPKITQTEGGPGILDPDYVNIMTTGHQMALMKYLTDAAEKLEEEAKAAGAKGIRIIGATCVGDDFEARAEHLPDTYAGFAGNNFATEALAATGLVDAIVSEFNCTFPGLKFYKEKLDVELVAVDDVAKVWGAELILWDPERAEEVAEEAVQRAIEAFKERRSKHEDKIMEPKHRHENVVGFGYFSIEEAVGWENVLKLIEEGTIRGVCAIMGCTNLSSGGHNVPAVELAKEMIKRDVLVLGAGCVNGAFANAGLFNPEAAELAGDNLRQVCEELGIPPVLHYGPCLAIGKIEHLVFEIAEILREKTGEEIDIPDVPAVASAPQWLEEQALADASSALALGITLHVSPVPPVTGSELVTKTLLEDLPDLTGGELIVETDMKRAGEILAEKIEEKRKRLGI

SEQ ID NO: 537 - protein, 370 aa, Methanopyrus kandleri
MVVTMEIEAIRVATGAPGELYMVAEIAEDKVVNAEVCSGTTPISWETLVLEKPVEFAVVAAERVCASCDASLGLAVVEAAEAALNVEIPDEAERAREILNMANVVRAHATVLARTDFLDVKKPAYDLVRAAKDIMHAVGGKPDHPPAVTVGGLDLEKLPVDRVESVAKDAAEVADRLEDEVGSAVDRMKEDIDVEPEEMPAGLKVSDTYKGDIDPDKVETLMPDEFYRMKTTLEIANNVVARYDGEPVLVGPYARVRSAENPLDLYTARAEEVARMLDGIANAVSRLDPTGNFRTDVELGSGEGTAAVEAPEGTLIVSLRLRAGRVDKALMLTPCNFKVAAIGEMVRDLTVDRAETVLRAIGLSGRCLTH

SEQ ID NO: 538 - protein, 238 aa, Methanopyrus kandleri
MKVAVLSLMACGTCARNLEEVCHEEGHEVVWSNLEGDEGEPDADILFVEGAVDFADAETLEKLEEAASAVSTVVSLGSCAATGGFERHVIGMRDPDRYHFTVFPAAKFVETDYAINGCPPTTDVIASFLRALEEENEDELRPYEVLSGDFHGLTPELSAPVTGPTVPVEDVLLTSNKDLCLGCDLDVIEKDLFCVGCGTCAASCPAWAIEMDEKPVIRQERCVRCGTCFVSCPRSFRI

SEQ ID NO: 539 - protein, 275 aa, Methanopyrus kandleri
VGEYREVYLTRATDERIREHGQDGGTTTALLAHALEEDTVEAVIASSTVETWKPEPVIVTDPDELIETAGSKYAISPNVSALNEAIASYDSVALVGTPCQITAVKKSKMYPYGLANVTERVKLTVGIFCTENFQYESLLKLLEDMGVDVENVERMDISHGEFIVRTKNGDVHSVSVSKLGDYANEACNYCTDFTAEDADISVGSVGAPDGWNVVLVRTKEGEKVFRSAVDADVLEVKDIGEGDPNLLERLARDKKERIHTSMCATWRPYHPTVPL

SEQ ID NO: 540 - protein, 154 aa, Methanopyrus kandleri
VIKPRDFLRYFLYSYIVTSAQLLGDKAPTLRRMVCKNVVKALLREHPELKDAEPVELVKDVAESFLGADVRIEEKSTETVVHVRGCKICPRDLIEEFTGENPDLEGPVFSYNVCAFVTMVEEILHALGHIDSDIKHDPIKRGRCRVIVRPKGTD

SEQ ID NO: 541 - protein, 242 aa, Methanopyrus kandleri
LTVPTFLRKVTLREICVIEEYVDVQYRAIEALMDTLPSTDLVRLTVANALVSYQLSSSGEDWWREFSSYFRERRPRDIVREYARFLPRSRGNRRLIRQKLRRLHRAKAFLEELSWQDAKSYYRDMNRLRLDLARVLNADPESKTIVFTVKMFGYALRAITGRFRPYPFEIPIPVDARIERITRRITNDDPQLYWDSIARRTGIPPLHLDSILWVGTSRDPEVKRLLAKVLPKLIGELEMLGN

SEQ ID NO: 542 - protein, 245 aa, Methanopyrus kandleri
MKLVIDVPKEIAKALDSKTRREILKLLEERGSMTISDIARELNLSKSTVHHHLQELRKAGLVDVIKEDRETPLPKRYYGLVRRLVRVSKPKLEDASEYVIKALERGEDLRTSMFLAIAAAYRAVLESLGIDASEVLYELGKEIGKRLAELGSEETVLRKGLEIIAESVEFRQENDRVVVEIEGCHECSDLPYGPACHLEAGIIAGVLSNLRERPYEVREVECCGEGADRCVFVAEPATDEERPKS

SEQ ID NO: 543 - protein, 113 aa, Methanopyrus kandleri
LSRKPGEPAKEEDEKGLIAVKYAEEMLGDEYAEVVEELHRIIWKESPLDDKTKHLIALALAAAAGDERRVGLIAETAKNVAEVTDEEIAATLALVAWVEGVSKVTRTWGVLRQ

SEQ ID NO: 544 - protein, 624 aa, Methanopyrus kandleri
VRLLFIHADEMSFEARQKTKIAEEEPPIKEAEVEDCLVVFAAVQEADEENPKAIAEAAVEEIEDVAGELKADRIVLYPYAHLADDLASPDVAVEVLKRMEGLLKERGYEVVRAPFGWYKAFRLACKGHPLSELSRTVTPEAAEEAEEEKIESEFLVYMDGELIPVEEVDLSELPEDFRHLVMHELGEERETGDEEPAHVKLMREKEICDHEPAADVGHVRWYPKGHVVRRCLAEYVENLMADLGAAVVETPVMYDLSEDAIREHADKFGERQYRIRAGNRALMLRYAACFGAFRLLADTTLSRRHLPLKIYELSQSFRLEQSGEVVGLKRLRAFTMPDLHTVCADMDEAVEEFLEQAKLCLEVGLDLGLEYEVVFRTTEKFLKERKEVLEELAEAMEKAYGDAKPVLVEVLPERKHYWECKVDFAFIDSLGRPIENPTVQIDVESGRRFGITYADESGDERHPVILHCSPTGSLERVICAILEGQYKRFEQEGKLPTLPTWLSPVQARVIPVSEKVLEEAEKVFEELKSEGFRVDLDDRDEPVGRKIRDAGEEWVPYVIVIGEEEVKKGTLSVTIREESTLKEQRREEMTLEELVERLERETEGKPRVPLTIPDRLSRRPRFGR

SEQ ID NO: 545 - protein, 167 aa, Methanopyrus kandleri
LLVKGGCELSKRRVLSVLVKDRPGVMQRVSGLFRRRGFNIDSIAEGPSEREGLARMTLTVKGNEQTIEQVVKQLNKLVDVIKVSELDPERTVERQLALVKIRTKDRARAAELARAAGAEVVDVGRETITVEIVGEPQDVESLLELMKDIGNIVEIARTGIVAMERET

SEQ ID NO: 546 - protein, 257 aa, Methanopyrus kandleri
LKKPVDAHCHLCFKYFKGEEDEVVERSRKKVLRVYDCGATPGTARRTLELAERFEGFVFSTIGLHPPRAPRMQQSVIDDVVRIIREHADRIAAIGEIGLDYHYVKEPGERRRMREVFERFLKLAEELDKPVVIHARDAEEHALEVLEDYDVVAMFHCYDGPAELARRIADAGHYVSLSTIHVIRGPKDERTRELLETVPLEAALTETDSPYLSPVRGERNEPRNVWRVIELLARVKGVPVGEVVETTARNALEFYDL

SEQ ID NO: 547 - protein, 75 aa, Methanopyrus kandleri
LRKTNLAALVSAVALLGALVLAFAGGPRWPVGVLALIVGGLDVMISFRRGGDRVLGLMGFLLLMVGIAVLTGRVR

SEQ ID NO: 548 - protein, 175 aa, Methanopyrus kandleri
LKLCLVAFDGRIPMLSSIVDRFEEHVSEYLGEVKVKKKRAKLPEHAYSKVRGQYLARALLDTLRGMKGEYDRVLGLTSEDLYAPGLNFVFGQARCPGREAVVSVARLLDPDPELYLERVVKELTHELGHTFGLGHCPDRNCVMSFSSSLLEVDRKSPNFCRRCTELLQRNLKRGG

SEQ ID NO: 549 - protein, 185 aa, Methanopyrus kandleri
MYRITSKKLETRRLNGAVVVTIEYVDKVGRRVVVRRAKRSDIPEVVEIEERAFPKSPYPTYVFLYNLSNNPEGFLVAEVGGKVVGYVIFELRPWLGEGHIVSIAVHPNYRRTGIGTILMGEAERKIAEAGYETVRLEVRESNFPARRFYERLGYREERREHGYYSDGETAIIMVKKLKSPIQYRQ

SEQ ID NO: 550 - protein, 429 aa, Methanopyrus kandleri
VNAKGPLTRSTPSPVCGGTSRLWWREYVKEIQRKAETGEYAVRGFGTSRKVPHFDDLVILPAQVSRPPIDKYREPCNTKTVLGDRFAEKPLKLDTPVLVGAMSFGALSKEAKVAIARGTAMVGTATNTGEGGMLPEEREEAKWLIAQYASGRFGVSAEYLNAADAIEIKIGQGAKPGMGGHLMGEKVTKEIAEIRGIPKGSDALSPARHMDIVGPEDLKMKIEQLREITDWKIPIIVKYSPGRVKEDVKIAAKAGADIIAIDGMQGGTGASPEIATENAGIPTIAALVQAVEALNEIGMRDEVDIIISGGIRDGADVAKALALGADAVYVCTSVLIAMGCTACAQCHSGRCPVGICTQDPELRKKLDVDEAAERVANYLKVVTEECKMLAQLAGKTDVHNLEKEDLRALSEDVARITGVKMAGSDVELA

SEQ ID NO: 551 - protein, 187 aa, Methanopyrus kandleri
LILIIDNHGQYVHLIRKNFDYMGVPAEIIPNTTDPEDVRERASGVVISGGPSRERAGNSREIIEELTGEVPILGICLGHQLMAEVFGGKVDWAAGREEYARTEVEILDHEGIFEGLPDKIVAWASHRDEVKEVPDEFVVTARSDRCEVEAMRHEELPLYGVQFHPELKFTEYGPDILKNFAKLCGEL

SEQ ID NO: 552 - protein, 434 aa, Methanopyrus kandleri
MWRTVKMGGSTTKFGFFTLVGYTALLLSLGAIVARLSEDRGLPDIPFLLLLGFLLGPIAGIVRPEYAQKAFPFVGTLGLIIILLDGGFEIGIDVLRRVASLVAKLDSITLLITAGISSLIFNLVFGLKPFSPIGFLYGSITCATDPATLIPVFSKVELPINISTALIAESVFNDPLGVVLTKMSLSVMGLSSHQNPILLFISLAAGGAALGLATGVVLERLLAREPFGEYVVPITLGAALALWYICEELLPGLLGYELSGFMAVAVLGMYLGNNLIKHDYLKDDRTFLKDFFEELSTVVRIMVFTLLGACVSISLLKTFWLKGLVCALSNVFIARPAGVIIGTYIPPKEDLNLKERIYLALEGPRGVVPAALVGTIYSKIVSNPHAVPVAIASEMPPKTLASAILVTTFLTIFISVVLEATWAQPLAKRLLKEE

SEQ ID NO: 553 - protein, 173 aa, Methanopyrus kandleri
LPVEKHVERAPKRLAIAVITVSTSKFEEAARGEEPEDTSGDILESRFEQAGHETRYRVLIPDQREMVAGAVKWTANRVDAVVTTGGTGLTPTDVTIEAVGEIAEKQVPGFGELFRRKSEEDVGAHSILSRAEMFVVDGTPVACLPGSPNAVKLGAELLIEVLPHVVVHSRGDV

SEQ ID NO: 554 - protein, 156 aa, Methanopyrus kandleri
VTAGGRRMSMVDVTGKKEEIRIAEASGFLRLTEDGVNAVKSGESHPQGKGDPIEVAKVAAILAVKKTPELVPHCHPIKITGVDVDVEVLEDGVKMSVRVKSEGKTGVEMDALTGLVVGLVTLWDMVKYAEKDEEGQYPHTRIENVRVVEKIIKEKE

SEQ ID NO: 555 - protein, 135 aa, Methanopyrus kandleri
MTFLTAGTRLVSLDYIAGFFDGEGSVVVRFVRDGRYRAGYRVSTKVVFVQKERDVLEEIHETLGMGHLYRRGSDGVWYLEIYRREDLREFVELIGNRTMVKRDALERLATVLELLEGGVHGSRDGLERIREVWEG

SEQ ID NO: 556 - protein, 289 aa, Methanopyrus kandleri
LTDRIETRIPGFDEMIGGGLPRRGVTVLAGLPGSARQPLLDNAVWNVLEDGFRVLLLATSTSPYEFLRRSEEYDRRAREAYEKGDLVVLNAFSVRAGIYHRTVGEIIQDLEPHRIRELVPEYDPDVVVIDSIYPMHRGEHEKFLQVISTLKVAAVRNDLAVLAGCALPESALRSPNAEVADVLLETAVHEFRGALVYSLLPIRTLPPHLPKYRAPVSILDDGTVVVHCDKVLDVKAGEIRDVDEYLNDVLNMPESMAREVAEDSEVLGELEEERDDIEKLLEELEEMEG

SEQ ID NO: 557 - protein, 189 aa, Methanopyrus kandleri
LNTLERVLTFLQDLRSHLDGTGDMPEPRTLAEFALQRLTPMDLDICINIVETELVLWEESGLHVRPALHPYVSERIGVYTLDDEEVGRFLGYPECCVEYFLEGHVRFDHDPDNVVVVTEGFVPCSPTCRRAHRVHLLEFDADPEPYRRLEGRLRTRLEKLGVLSYHSAYRGFYEVHVPKFEGVHLDRPY

SEQ ID NO: 558 - protein, 328 aa, Methanopyrus kandleri
LVRVRSVSRIHVTLIDLHGGLGRVDGSVGVTLEGPRIELEVEPTGEGVKVDGEGEIAEKAERAARKVLDLYGIEGGVRIEVVRRYPEHVGLGSGTQATLSAAVGTLEAHGVEHYDVRELADALGRGGTSGIGVAAFERGGFIVDGGHVFGPGGKEEFKPSAASGEVPPAPVISRLEVPEDWRFVLAIPEVERGAHGDKEVNIFKRYCPVPAREVGEICRWILMVMMPAVVEDDPEDFGRAVDAIQDLGFKRVEVGLQHPVVREMMEVARSAGAYGAGLSSFGPTVYAVCDSPSARDVAQELEMYMREEGIGGEVSVSEPRNEGFEVTG

SEQ ID NO: 559 - protein, 420 aa, Methanopyrus kandleri
LGVYVAENFTGVYAFDEEGNLIDHEPFPKDPDEIVERLLKRERGEVLEEEEALLSRLDADVINFEGTKADRERLEEVFDGELVVEFPNVAGEVLRERARELAVEVGVVDSEEEYSELVYEVGMKLSKEKVRATVEERDQMIIQAINTIDDIDRILNILTDRVREWYGIHFPEINKIVKKHDDFVTLVAELGHRKNFTYDNIKEVLPEFPDHLAEKLEEAAKDSMGAEMDEKDLAAVQRIAEVARELYEIRRKTADYIDESMDDVAPNVKALVGPLIGARLIALAGGLKEMAKLPASTIQLLGAEKALFRHLTKGTKPPKHGVIFQHPLIHRSPWWQRGKIARALAGKLAIAARIDAYSGEYRGDELRRQLEQRVKEIKEKYPKPPKRKRGGRPPRGRRPRRRRSPRRSRRDRRRRSRRRR

SEQ ID NO: 560 - protein, 232 aa, Methanopyrus kandleri
MVEIEIEPHEEFEGVYWAIFEDGRKKPATENLVPGHQVYGERLVEYDGKEYRVWEPRRSKLAAMIMNGMEYFPFEEGSKVLYLGAAAGTTPSHVSDIIKESGVEYCVEFASRMMQELIPVCEKRPNMIPILGDATKPHGYAPLVEQVDVIYQDIAQPKQAEVVADNAEAFLRPGGYVIVAIKARSIDVTKEPEEVFEDEERKLEERGFEVLEVIDLEPYERDHVGIVAEYHG

SEQ ID NO: 561 - protein, 323 aa, Methanopyrus kandleri
VNVLEVLVVVVPSLYMGWTIGADDAGAAMGSAVGAGVRTMRQAVTLIAVFTTMGAVLEGHKVVKTLGKGVVQAHLDPIAAGATVLVAAAWYHLAVMLGVPVSTTQATVGSIAGVGCALGLPVNWSKFGQIAVGWFLSPILAMIPAYFVSRRLRAVLEKGKWPLAEIERKIGWLLTISGCYVAYTIGANNAANAVAPIVMTGLLDVRSAAIVGGIMIAVGALTAGSKVIETVGRKITRLDPVTAFSAELSAAIVTHGASELGIPISINETTAGAVIGVGLSRGELNTHTLKKIFTTWIASPVGSFVMSYALMRLYLSVRGAAVP

SEQ ID NO: 562 - protein, 204 aa, Methanopyrus kandleri
LILRPSTRPAERALDALLEELDTMIEACDLLSDVTTMEESPKEVEERQESLSEEVAELKDRVDEAMESSSMIPVVKEELGYIAENVRRAAETLLSLASLLVSFYEDLEEEDREKLDEVIEGIAKIASGVRESVELLNEDVRKAAEHVEKIRDQEEDVRSRLRTLMLKTERNGRLAPIVLEIERALEDMDRALDGVNRIKVRFLG

SEQ ID NO: 563 - protein, 318 aa, Methanopyrus kandleri
VRPVEVLGKRWAHPIACASGALAAHRPGMENAVLRGAAAIFTKTVTESPREGHPGPVFVDYLDEGYALNAMGLPNPGPDRMVVEIEEFRDEFDVPVYASVAADGPEGFKRLARAFSGVADGLELNVSCPHAGKGYGAELGSDPEAVAEITEAAVRAFDGPVSVKLTPNVDRETLLEVAAAAIDAGAEALTAVNTLGPGLRIDLRTASPVLGAGVGGLSGPALKPIALRVVADLALEFGEEVEIIGVGGIRNGEDVVEFLFAGAKAVQVATAAREKDFGDIAMETSHILKELGYDGPEEAIGAALPEYRERLRRLGWCQ

SEQ ID NO: 564 - protein, 262 aa, Methanopyrus kandleri
VVSVKPIPAEVVENREECERTIVLRLRPERPIRWEPGQFLMLGISGVDEKPMAFSGGDDREFELTIEIVGPFTERCADLEPGDVVWVRGPYGKPFEVRGSRAVVVAGGTGVAPLVPLVERLRRARVHVTSVLGGPHADRLPRKDDLEKLSDELYVTTEDGSEGRKGFPTDVLEELVEKECPDVVYACGPEGMLVRVAEIAREHDVPCQVSVVRYVKCGEGICGSCALGKGLLVCRDGPVFWTEELEGTEFGGVRRDVTGKPE

SEQ ID NO: 565 - protein, 248 aa, Methanopyrus kandleri
VTSRESLSDVAFVLPAHNEEGAVGKVVREIRRMYPDALIIVVDNASSDRTAEEAEKAGALVVREPVKGLGKAIKAGIQCALEHGARIILRTDSDGEFDPNCFAELIEAADDYDLVIGNRFSEGRPENVPLSHYLFNMILITLFWLFYGKILDVTCGCRVFSRELAREILKRDVDDGPAFDADTTSLAVSLGYSVKSVDVRLRGRISGQRKVAPTVIGKVLVGLRILFRVAVNRLRWRCETPSTLSRGQ

SEQ ID NO: 566 - protein, 348 aa, Methanopyrus kandleri
LGLAELRELIEPEETDLRALAGREIAIDAFNALYQFLTTIMKDGRPLMDSRGRITSHLNGLLYRTVNLVEEGIKPVYVFDGEPPDLKRETLERRRERKEEAMEKLRRAKTKEEREKYARQVARLDESLVEDAKRLLDLMGIPWVQAPSEGEAQCAYMARCGDVWATGSQDYDSLLFGSPRLVRNITIVGKRKHPHTGEIIEVKPEIMRLEDVLDQLGLESREQLVDLAILLGTDYNPDGVPGIGPKRALQLIRKYGSLDELKDTDIWPKIERHLPVEPEKLRRLFLEPEVTDDYELDWDEPDEEGLVEFLVEERDFSEDRVRRAVERLKEALQELRKGGRQETLDAFF

SEQ ID NO: 567 - protein, 273 aa, Methanopyrus kandleri
LIAEVAEFVLEALLVIGVSVFGLHLLGALASEKIRCRAVPLVVVGLIHPHAALTTAREMGLKGRELLIAKVSFNSATYTATACVNALTLLGSTVGGPYALTLALVDATETIVGGLLLRRVRAQLPTHGSLRDALNEATRTVGRIAAYLVPGALLGIILSSYLRGLGGYVVPMTFLANPVAGCAAVGTMLRSGVLDYAHAYSLAVTGAALAYVGRLLRSCGPVTVAITGLRSGSLLSTVNLLADIGLLLVYGMVIGYLTFGPPGVPPLGVLGGF

SEQ ID NO: 568 - protein, 301 aa, Methanopyrus kandleri
LGSLETEPVSLSLKRPFRISGREVRRVRGYWCTCVIEGNSGRGFGLRRGIAEEMATLDAVARRYDEPLCRVWGREPASIESFATVDLVGAEQAEKLARRYYLRGYRKLKVKVGGDDLKRDLERVEACVKSAEFDALILDGNEGLTVEEVFRLLDFLDFDGDVYLEHPTPPDSLEEVCESCEAPVIVDVMDLGARSIDDVLDVAEPCDIVNIKTQEVGFVGGLRLARDAREEGFKVMVGCAVESFSSISAAAHLAAAVEADLCDLDGHLFLDEDVVSNPGYAPVMVTEGPGWEVRVERPKPA

SEQ ID NO: 569 - protein, 345 aa, Methanopyrus kandleri
LELPHKPGTPAIILCHGAFDEPHGKTAHGLLRFGRIYDIVAVIDRELAGKTAQDVDPDFPPVPILRSVSEALEELDPEVLLIGAAPPGGKLTPEWKEEIIEAVQAGLDVVSGLHEFLSKDPDISEAAEESGSRLIDVRKPRKELFRVADGSARDVDATVVLTAGTDCAVGKMSAAIELVERLREEGVEAAFLATGQTSIMIGAEDGVVVDRMPGDFMAGAIEELVVRLAEDHEIVVVEGQGALSHPAYSGVTLAILHGAWPDAVVLVHDPVREVRDGFPRFRVPDPRTEVTLIESLSAAEIVSVVLRTWDERLAEKLSSEGYLVERLGDLRRTVDRVLEIHRMGR

SEQ ID NO: 570 - protein, 116 aa, Methanopyrus kandleri
MRIRPDSTAEDILPLAMAVHELVNRLPVTMRTRDNPGVRIEDGEVIDDEYTGPVLEEVLEKGEVIRKVPESGPYEGTPVVVVPIKDEGETIAALGVVDLTYGIYSSLRKVTQRPIR

SEQ ID NO: 571 - protein, 192 aa, Methanopyrus kandleri
LKPKCYRCPSPGDTCDRCGLADGDQMERTVESYRRDELFRSASEIEVEGYMEWTRVEEIAELCERMVWKSVGVAFCVGLAEEARALCEFLEGRGLEVYSVCCKVGGVPKSKLSLLELKPGDKVCNPRLQARLLNEIGTDLNVLVGLCVGHDIIFIEESEAPVTVAVVKDRRLAHCPALALTNRYYRRKLGLE

SEQ ID NO: 572 - protein, 305 aa, Methanopyrus kandleri
LAKKLCFFLGCIMPNRYPGIEKATRLVFEELGYELVDMDGASCCPAPGVFGSFDLKTWVTIAARNLSIAEEKGYDILTVCNGCFGSLNEANHLLQENPELREFVNEKLAEIDREYKGKVKVYHVNTFLYEEVGVKKIKEKVERPLEKTDGEPLKVAVHYGCHLLKPSEVTGFPGSVEDPRTLDELVEALGAESVDYKDKIMCCGAGGGVRSRELKVSLHFTREKIFNMLEAGADCTTNVCPFCHLQFDRGQIEMKEHFEKLPPKKLPVFHYCQLAGLAFGMDPEELALETHEIDCTPVLEKLGLA

SEQ ID NO: 573 - protein, 192 aa, Methanopyrus kandleri
LVEPRDTVIREEDLNPDFLEELSELVEPVFEEEEVLSVQACYQCGTCTGSCPSGRRTSYRTRLIMRKLQLGLVDEVIKSDELWMCTTCYTCYERCPRGVKIVDAVKAARNLAAKKGYMAKAHRMVAMFVIKTGHAVPINDEIREVRKNIGLDEVPPTTHRYEEALEEVQKLVKINEFDKLIGYDWEEGDLVD

SEQ ID NO: 574 - protein, 252 aa, Methanopyrus kandleri
VRLDVDVAIRVNGVLLTPEELELLLKLSEHGSMSKVAEEKGVTRSAVHKRIRNLEERLGCRLVESSPLGSYLTEHGRRIVIKYVNAKARLSRTETTVACSETVIEDVLAALGREHDVDVIVPPHEKMRRVEADVVVPDDPVIVFDRSDEAVGEPVVVRRTRLVRVGDGSGFVEVPGSAQRIYLTDLRNREEIRPKMRVSYYASALEAVRDGGMWTVVPEELAPEGDDPGPHYTVMALPLTRDGEDLLDVLEG

SEQ ID NO: 575 - protein, 235 aa, Methanopyrus kandleri
MPICVEEPERIREAAESLMETLDLDLYPVAMKLYLSEGDVPDDYERVGEECRHCEFVMTVARGEMDNIYATPEEQACKGGSAAIGLDDIPDPVRTGKFYYEGLGQHATLSASKRTVELVPKAFDGEGVFEAITYEKATGVEVVPDVILVVCKPKEAMKIAQAYLYPEGGRVYSDFSGIQSLCGDGVGKIMKEGGINFTLGCNGSRAYAKVPDECLIVAMSTKAFVVVGHSVTEIP

SEQ ID NO: 576 - protein, 129 aa, Methanopyrus kandleri
LRPFLRPIVVELVQGTAELRPERVLSCVFGIKEDEAELYLKLLENSEEAPFTVEDVAEIINRSRSTAQKMLQSLVRVGMVERERETLPGGGRRYLYRPAPWEKVKELGLENLRIVCEEIERWFREFTPH

SEQ ID NO: 577 - protein, 69 aa, Methanopyrus kandleri
MSEERRPFKAEKVETRDGEILLRCPRCDALFRDQKSYSRHVNKSHLYKKNRPKRILKKMKRRGDVLVQD

SEQ ID NO: 578 - protein, 150 aa, Methanopyrus kandleri
VGKRVLAGGVFDILHPGHVAFLEEARKIAGKNGELVVVVARDETVRRLKRTPIVPEEQRVRMVSALKPVDRAILGHPRDFSITLKTVKPDVVVLGPDQDIDEKEVERWAERAGVDCEVRRIEKYERCPLDSTIKIVKRVIELWKRGELRV

SEQ ID NO: 579 - protein, 148 aa, Methanopyrus kandleri
VLVLARVFIHPPNSLILHDLVERFGHEPLSLPKEISKRVRDPEIDSPPMNVTPQDAKRGLKYAAVEVPSGVRGRLALIGPLIEKADAAIVVTGIEDFSFGCLGCDRTNEFVTYLVRRQGIPVLELEYPKSEEEAKAFVREIRDFLESL

SEQ ID NO: 580 - protein, 407 aa, Methanopyrus kandleri
LAVQIAQLSCGTEYSGVQPEIERAAERVGAEIVLPEVDIDIVEEACEEVGYTPKSANLKVLLARAYALANGYAEADAAIILTCFRCAEGALVRSEARRYLQENTDLPVVTYSFTEDLDASELLTRMEALVTIVERKGLLARKRQEGLTLGIDSGSTTTKAVVMEDDEVIGTGWVRTTKVVESAEKAVERALEEAGYELDDIEAIGVTGYGRYTLGRHFDADLVQEELTVNSKGTVYLGDKQEGGATVIDVGGMDNKAITVWDGIPDNFTMGGVCAGASGRFLEVAADRIGVDLDKFGKLALEGDPEAVRLDSYCIVFGIQDLVTALAEGADPEDAAAAACRSVAEQIYEQQLQEIDIREPVFFVGGTSLVDGMVKALEDVIGVEVVVPEYPQYIGAVGAALLASNYV

SEQ ID NO: 581 - protein, 208 aa, Methanopyrus kandleri
VYEHRGKRILVRASEKEAAELYYDITRHAATDLGLARTITAAVFHLDIEAPLYAAAVRTRPMLRPVTLGKVSHLELDDEEGTLKVSVAVERYFPDVIRTLQSVFGEDRVRHEERLEITIEPPEGMSPEHLEKLEELVVHDPRKKLAHRVYDFIERVRPEGFRVARYARFDQDFLYLASEGTLEDEWTDLLFELPGELDRVGERRGPSE

SEQ ID NO: 582 - protein, 282 aa, Methanopyrus kandleri
VRGPCPNDHPCYVGEHGKFVKVHLPVGGRCNIHCRFCESGLEHEGVRVDYPGRAVRTITGDEARTALKRVKEHCGRVDVVGIAGPGDPLANWEDVKETFDVVAETVPEAKRCLSTNGVWLPDLIDEVTELVHSVTITVNALDPEIAADIYDRALTPEGEVLTGKEAARWIVERQEGAMDALKKERYILKKVNFVLVPGVNEDEVERVAERAADAGFHAMNVIPLIPGGDMKDHRPPTCRELSRARDRAEKYITVMRRCMQCRADVIHCRGRPRLIWELLEED

SEQ ID NO: 583 - protein, 308 aa, Methanopyrus kandleri
LGVASVFETVIYEGGVYKADEMRDLVEDLGGFVLSEHQMQLEVHMVLAVPVDDLDVIERKAEELLGEIRRMPLAGTEIAVVGMSLARHHMPHPVCDIAEYLRRHGAKSNVIGLARGYGRELAQLRTREKRLLEEHDLVIFVVGNFKDCIEKYKLPLVRRIERVPVVVVGGPEEIDADDVVYVGGIGRKPYRFRKGREITKLDEIVDVVSKIIEERRQELAEDPPVVPPMVVKDRINRELKIEERFTSPMPITLQLDGLRVKAPYDEWADRVAEVEVFGWKLREIADIRRSEMDDHILVKIRPKSAVTG

SEQ ID NO: 584 - protein, 242 aa, Methanopyrus kandleri
MNVRPGGPPVLDPVRLGVPMEVPEDPVELVRVFRVLVETLERGTLPFLGASYRSVNGKVYGPYYEARWKPRKGERGRTIYLGREDNESVQFLREWLETIRLAAPRLSEHRKAKWFVARAVRRALVPVLRQLAQMSAEHRAEVLQKLEEIVKEGVSRTCSILRSVEFNPLRRLGWPGSGKEIIDSVLRGLPGTVRDILVDVLAPWPAWYSLRIVRLWRGEREARRYWRERVGLYDRVKQREAA

SEQ ID NO: 585 - protein, 428 aa, Methanopyrus kandleri
MSRGTKAGIYRDVLVIEVFPGAVPDTGTLRALNERERRLLLAAAGYDVTEFWARSFIGLLFDHPTPLVRASERHEKLLPEATVAAVRELCDRIEPEKLRKIRSRVASGETPREAVRRVLGSKMAGAVSRLLGRVMGYVQSDPLSVAITLQVLGTMIAADKRLEDVSTVLVVVPGLEHVHIDVYRLARRVYSNLVRAMKSLRRYLNPRVRVRVYVATGGKLEHPAGDSPEEELIEAYEELSRRPTVRRFFPERGHFTEVPWDRALAEFFVRVIRRELHRRSLKVVRAAKREGASGRELSEVYGREYGKWLSRWFKRGRRWLNFHRPSPALSDISCCFVASEAGVEGYHEEFLIKVLQKVLREVVERRVTGRRLVRKIVRKIARVLKEDFRVEGKIREGILHMARLLGGRRKAALGGKTLLEAFGAPPPS

SEQ ID NO: 586 - protein, 316 aa, Methanopyrus kandleri
LDFYSPTFHSRECETAGARKMDVKTLVGEYYASLPSGVLREFVEDPSSREWAYTFLKGRDIVFTRKRRLDEVSGFLELYHSTGKFKNPKSWEGLLGWDLVIDVDAELPEEPEAFLKSLGRLLKDVVIACDELRRALGFPRPDVVNFSGSKGFHVRYFDSTVRRWLRWDLHERRGIKPGEIIQRVGRGVVWLAREGFVAGDRVRALREGLLDDSMYDLKRLIRCVGSMNVKSLLPAVPVWSREGGRWVDFRDEVLGMNDLELGCLVAHRTLTWPGRGGLGVVLSRVLDLDTDADPEDPSDFVEVWGNVMSVLGELKP

SEQ ID NO: 587 - protein, 190 aa, Methanopyrus kandleri
VRFVVPFADRGDRKTRLSSCMDEETRERFALAMLRHVVRVLSKFGEVEVVTPDSSLSVPGTKVRRSDASLDELPLPDGEFGLVMSDLPLLSEEDVERALEGLKDADVVLCPSRRGGTSGVFVRKGVRFRPTFGGVSFPRNLRRAEKQGVEVAVVKSLGFFADVDEPEDLLDAALLGRREVAKIARSVVEV

SEQ ID NO: 588 - protein, 359 aa, Methanopyrus kandleri
LLSREEILEILSEYDLEDLSIATLGSHTALHILKGAKEEGLRSVVVCEEGRTTPYERLGVADEIIVVERFQDMLDEEVQERLRELNAIVVPHGSFVAYVGLDGIENEFCVPMFGNRRLLRWESERSLERKLLKRAGVKVPKVFDSPEDIDRPVIVKFPGARGGRGYFICSDPEEFEEKAERLIEDGVIDEEDLEQAHIEEYVVGTNFCVHYFRSVVEDTVEVLGMDRRYETNIDGLVRMPAGDQLEAGLEPSYVISGNIPVVVRESLLVQLYEMGDRVVRASEDIEEPGFIGPFCLQTLCTEDLEFYVFELSARIDGGTNVTFLPYAYLKFGEIVTMGRRIAKEVREARDKGLLEGVVT

SEQ ID NO: 589 - protein, 432 aa, Methanopyrus kandleri
MLLIVAGHDPTGAGLRADIATAEALGVPAVSLPTLLSLQDEGVELVEPVDSRFLSDCLARYVPRCEVVKVGAVPTLKTFEILAKRLRDLTVVWDPVFRAEAGGELSEATPEEALETFGETVDILTPNTEELSQLVGREVRTTVEAELAARELVEEYGLTGVLVTGGHSVDRRDVWVPAEGNTIAWEVPPGEGAHGSGCVLSTALACFLVRGLDPETAVERAVRFARAAVREARNTPFGRVADPVAQIRRDATLGKATQHVIRALEIIESDPAFARAIPQVGMNVAEVFDPSRGLEGVVGLSGRIVLDGDRPTAVGRPVPGGSKHVGTVALTAHRLDPSVRAAVNARYDEELIERARDLGFVVSSFDRSEEPEEVDSTMEWGTEVAFRRADDTPDVVYDEGDVGKEPMIRVLGKSAVEAVTKLRMLLGCVVGV

SEQ ID NO: 590 - protein, 203 aa, Methanopyrus kandleri
VSSFKRLLYLDVISRSHADFAKRVIRRLEPKVKVRVECLSKYEREDDALTYDGRLKDEEPWKEFLRRLGRESSDTVVATALNVPPDVPDISPNPTVVIGVNTGDHPKTLEVAGLADVVVVGRRLYSPSTGPREFGRVRSGRLRNGTVIVDVEDLGLRYASKAVPVIAVLVAENGVDGLIRDLRRNRVRTLTEEVLRDLSLSQV

SEQ ID NO: 591 - protein, 264 aa, Methanopyrus kandleri
VSKAQILVVLAMLSVGLQSVSAAPIEGQFVEENDYQWSVQVTHCEPTIDMTKYPVIVGEKAVYLVLLDERDVQKGGGLCDYQPALMPVPKDYVEISGNKLSFKVNLEGQKLPFYCMYLGVDFPDKLVMVTIEELAKHSVRYDWGYISEPKPLTLSFLRKIVEAFESQVDNPFPHSAFKNEAVWNAVRDTPYIISGPVHVSAVDYGTDYVELEIEIPVRTDVTELTGTIEVKSGESTQTLSVTGSDVVNGVIKKREYRRPRIPWK

SEQ ID NO: 592 - protein, 253 aa, Methanopyrus kandleri
VEVTIQLSGVVEGQQVTDVYPVTITVQLVKLNSSVNITVEKITESEAVLRVDYQINTENCSVKSVEVKLLKDGNVVASEERSQAEGTVRFTVNESGTYRVVIEATVEWTTPSGRHEEKLTLASEDVEVTLSRLEVGAPSVKVSDYGADWATLEITVPVTAVGCEVTGGKVEVIEAGTGHTLATTEATVDNGVLKATVKLTGLRSARIPIIVRVTAEGKTPTGDSVTATAEASVEVRLASAELGGSVRVESPRP

SEQ ID NO: 593 - protein, 152 aa, Methanopyrus kandleri
VCYEIHTQNCTVESVTVELLKRTDQGWVVVDRRTLSATSDVVTFRVSEEGQYKVRITAQCTHGVTMTAETEPVTVQFLPKVEISGFKVVETDYGPDWVELRITADVHVERAEKVSGLVVVEDAKGNVLGKFPVEISDHMDVKVRLEGLENVS

SEQ ID NO: 594 - protein, 89 aa, Methanopyrus kandleri
VDSVVLSKKVKRIVEVRGDQLVIETQTGERCILKVDERGELRPVKFLVIKSGSYEVSVAGSAKAKAKARATPLILILPILLRLVRRSTA

SEQ ID NO: 595 - protein, 289 aa, Methanopyrus kandleri
LRRYRIRPTDFVAVVSHFEARELLRAVRKGGEIEIQLDLGLHSGKARINGDTVVIEGVELTRDELESMTGWKGAYGLTTDNVYRIEIRAEHYYKLLPVRPGEAPTIEIDGIRMHRTKWTDPWTDAGVKVGKVGVSEGDRVLDVCTGLGYTALRAVERGAEVISVEKDRNVLEIAGANPWSRGLEEVEILLGPAEEVVPSLDDEFDAIVHDPPRLARAGELYSENFYRELLRLLRPGGRLVHYVGAPGSRYRGKDVLAGVSRRLTRVGFEVVDVDRRWGLVTAEKPSARV

SEQ ID NO: 596 - protein, 154 aa, Methanopyrus kandleri
VLPDHGSYALVFRVNRRVKVNVGSLGDVIVEAGSWTYVGSGMGQGSSGLRGRLGRHLKSAREGTERPHWHIDHLLSQVRPEVEGAWIMEGDRECELAAALADMVPGIRGFGCSDCHCETHLFRAGIAETAEAVRRVGGGTFLPTPTLERWVSQL

SEQ ID NO: 597 - protein, 789 aa, Methanopyrus kandleri
LFGDSRLVLALLVILVGATIANAGNLMYPLLSRDSRAHVLKIWYTYHMLADGRWDPWCPMWYSGFPYLTYYGSLGYLLGAAVDAIVKDPVRTFVVCLIVASALIGVGVYALVRARGYARKVAVICALLGLTSGGFMKALNWEGVYPTILSLGFGFLALSCYERWLRGEKRHLAYATLLLVPACYSHPLGGLLSGGLILTRGIAEAVLREKLRTPRFLLQSTAPVAIGIAIAFSHYAAAIYYKRFLSELWLYPPGSVAGVLKDLTVGGKWSTGLLVTVTGIVGVAYEIRRRTGFGLFVLFWGMVSIVVTFAFVLGYWKYLPLGKNMLAERYTTVLMPMLLAVTAAPVVRQLLRSVKAAWAAPLGVAGLLLSGSVGALTYVPPEPPHVTSSAMKLWKWMGDSWPDDSYTARCDADPYTHLFDASVPISPIYSGHPTIMGWFSQGDPMFFSLAARWEWELGWVYDPNTLKTSLWATNTRYLLTKSSLLSKKLSQEPGFVLRKKAGDYRVFEFLGHGGSACVVPHPIAVVDRRLGLRTENAYYTTLLNFVATPGNRYVFVDATFCDARKFDRVIVRPLTPGDVDRAVKLAREGRKVLLILPVSDTRVARAVERLGVRVSPASPPSFVPLRKYLPSAYRVDGRWWKDVRVGHGLVRVCGVDVVYFTMRFHRLIKEVQTEGYRMPRLPTDEERKFVNGVLRGFDSGKPTQVHLEYRGDPAVMRVCGNGWVYLKVKYFPAWRSSDGPVYPASCGQMLVRAHGDTVLRYELPQSLSYGSYAAAVLGTLALGAMLLWM

SEQ ID NO: 598 - protein, 159 aa, Methanopyrus kandleri
MDVIRAILVTLALLYGVGWTSTVVNWTIPHEMVRMSAGIYQSTGATTQLTLNPYRGRATLAVAYDPAVLVKLGDRGKPVRLSPSSLRVGRVKVKSYGDAVVIHGPCSVRPYISAHGVRYSFDIIDTPGFSVYFNRSGYLVLVSHGKTTKIRVLPLIPLI

SEQ ID NO: 599 - protein, 336 aa, Methanopyrus kandleri
VPELPYVAVPKHMAERARRVLSREDLLAKDVKARREEDMVLFPVRDAGRAGSVLEELGIPYEAGEAEFERTVEHRSVEEVLEDSFGWSVPVPYDVIGDVAVVQIPDELRGHEREVGRAIMKVHRRVRAVFERGPVRGVFRVRDLRRIAGKGPAVTEHREHRCRFRVDLARCYFNPRLATERRLLAEDVVEEGSTVLDLFAGVGPITVILKRFVPSVEVTACELNPVAYRYLLENLRLNRVEARAFLGDAREVSRLVGRFDYVIMNVPKMAHRFVETAVRCVRPEGRLIYYRIAPNAEEAFEELRRKADRPVELESHREVKPYSPEESLYRLVVRVH

SEQ ID NO: 600 - protein, 157 aa, Methanopyrus kandleri
VIPVTVVYHNVHSPRKVEEMARTVAGFGAKRFVISRALGSAAQEGVPKAQRICLEAGVELLFFQDLEEALKALSPDVTYMAEDAEHGGAKPLDFDAVVEEIEQEREVCFVFGSARPGLTKQELELGDEAVYVGTERNVGEVGAVAILLHELRKRLNQ

SEQ ID NO: 601 - protein, 319 aa, Methanopyrus kandleri
VKKVVALGIVIVAVLGGALGYYYYTTTSNVVRIGYQPSDHSAALFVAMAKKMFEKEGIKVETYEFKAGPPETQALAAGKIDVAYIGCVPAITAYSKGVPIKIVAGVNQEGSAIVVRKDEAGKIKDIKDLKGKRVAELMKGSIQDCMLRTALKRAGLDPDKDVDIVEMKTADAVNALGAKQIDAFIEPEPGPTMAVKKGFGVRLMDTGKIWSHHQCCVLVMRKDFIERHPNLAKKVLKVHVMATKYVQEHPDEAAKITAKQLKVPEEVEKEAMRHVRYSVDLDVDSIKMFARFLKQLGYIKELPDWSDFIDLKLLKEVAG

SEQ ID NO: 602 - protein, 251 aa, Methanopyrus kandleri
VIRNGDERLETLLKVSAPVAVLAIWQAVSGLGLINPVLLPPPSQVFSVFVEMPGEILKHALTSLYRVAVGYSIAAVAGVSLGVLMGTYRTAHAAMDLLIEIIRPIPPIAWIPLAIVWFGIGDPSAFFIIFVGSFFPILINTISGIRSVDRIYVEAALNLGADDTALIRHVLVPGALPNIFTGLRVGLGVGWMCVVAAEMIAAKSGLGYMIIEAQRILATDQVIAGMITIGLLGLVMDRGFRYLERRALVWR

SEQ ID NO: 603 - protein, 246 aa, Methanopyrus kandleri
MAVILKVEDLHKSYDDLKVLDGITFEVSEGEFFAIVGPSGCGKTTLLKIIAGLEDYDAGRVLVDGEEVREPGPDRALVFQEYAIFPWKTVLENVMFAPLMQGKDPEEAERIARECLKVVPGLEGFEDAYPKQLSGGMKQRVAIARALAAEPRILLMDEPFAAVDAQTRNKMQEELLKIWERTGQTILLVTHNVEEAVFLADRVMVLSPRPAEIVDIVEIDLPRPRDRTDPEFVELRARILDMIGSR

SEQ ID NO: 604 - protein, 244 aa, Methanopyrus kandleri
MSGHTGPELAPELERHGVGMVILGGYPGDDATYRASKLVARRRDEFAVPPDRLPEELSRVDVEIPVAVNVRFADPREAGELSGELADLVDVVEINAHCRQPEIVRAGAGEALLEDRTRLIEIVEAVAEHDVYVSVKLRGPHPAFEDALEALRDSSVDVLHVDAMKPGEPTYELEYVRAAARVGVPVIGNNSVRTPEDVDRMFEAGASAVSVGRPILEGDWDVLERLVRYTVLRKSSEGAGLART

SEQ ID NO: 605 - protein, 474 aa, Methanopyrus kandleri
VPLRSDYRYRSITLKIVGPEGYRRDLIFLSDRCTAVYNELNYLRRRFFFKGKLDAVAVSRSELTFRRIYREYGPILGTQTVVAIGEKNTEAWRSYFKQIKEVKSNKRRTICQPPRYWKGPLGREPRFVFLASQIRRFEYDPLEHRGVIEILGLGDVVDNLPNVGFKRGRGRGVRLEFVGWFPWHPNRVKEPKRADKIILNGDDGKEFFGRSEIVYSWADNAHYLTLNMKVNKGESWLVSRLTPNGRVRPIPRTGNNCENAAAVDIGRRIFAAVYFSDGKKPVLVRWGDAWSRWSYWRKIKAPKEQRRLNKNGANFSHRLKQYYVKAHRAIMDAIRHLVSKLVQILLSREVTLLVIEDLKGLRQKLHGELAYWAYKRIIREIKRKCEEYGIEVIEASPAYTSVTCPMCRSKCKRNGGLVICSKCGKTMNADIVRAYNLLTRATDDPPEPELEYLTGSNCTTVLPSNHKPPITPNR

SEQ ID NO: 606 - protein, 375 aa, Methanopyrus kandleri
LVSVLRTLLRIPAVRRSLVVLSSILLTSTVIFHFLEGWPLLTCLYFTAATITTVGYGDVVPTTEAGRLLSVIVMFSGIGVASYALGDIIQLVFRGELSLAIKEDVLRKRIKEVENHIIVCGFGRTGSRVARLLSERYKFDVVVVDKDEEAYERAVYQGFPAVLGDATREDTLQEANVESARGMVVATGDDRTNVFVTLLAKNFRRDLHVVAVANSREGAKMMERAGADEVLFLYDCASRHIVRAALSPTMFRVTVRHSVDEISDVMWIIIGNGGVVQCVEYYTPPLKSPIRRDVVISSMDEVMRFVKSLEKYPERKRTLEDLYRVSENVHTYYVIVHNEEERERILRELDRRGYLVGVDLTIDEILQEIERLRGE

SEQ ID NO: 607 - protein, 309 aa, Methanopyrus kandleri
LSSGFKRPSPRTWRPKEEEELIELIVEACPTEGPRVKAGDDDAAVLPDGTVVNFDAMTRSRHVPKELRDRDLGWKFVASVVSDVGAMGGEPSFFGFSVCLDDEVDVEQLVLGISEGLREFGVSLIGGDVVEGEELVLSGTCLGKLKGEPLLMSNARPGDVVAVTGPLGGPNAFVRAILNGMEPEETLYERFARPRPPVEVGVELARGGYRAAVTDISDGLLAEAEAIARRSGVAIEIHTWKVPVDEGVEEVAQEFDVDPVDLALEGGEDYEFLICGPEDVVKEFGLTTIGRVTEGEGVRIVRNPRARSE

SEQ ID NO: 608 - protein, 177 aa, Methanopyrus kandleri
LKPELKRVPREELESIANEMARKFNCERVASVVRSFHLIKLEGRWTEYFVVNRVDFDPADLPERADPFLVGRPFCERSARGDLRIHVEGARELARRVDEIKTYVTERAAVLFTYGRDVLPESIVEIRGPKEPRLVAVVYRDDLGEHCVGVGRLRFSEDGRPVVDNVIDRGWYLRRGG

SEQ ID NO: 609 - protein, 215 aa, Methanopyrus kandleri
MLAISMDVENVPGALKAIAGVIADHGGNIVHIQQDSEGELARLYMEIEGVERPKVLVSELRSLDVVREVRVLRPLKEIYGKRVIVMGGGAQVAEVARGAITEADRHNIRGERISVDTIPLVGEENLAEAVRAVARLPRVGILVLAGSLMGGKIAEAVQELREEHGIPVISLNMAGSVPEVADLVVTDPVQAGVMAVMAISDAGVFDLSRVRGRKF

SEQ ID NO: 610 - protein, 187 aa, Methanopyrus kandleri
MLLEKSLEEAPVVNRNGYWYFIHPITDGVPELPPELLREVAYRIVRALDSTDFDKIVCVEAMGIHLGALLSDMLDRPLVIVRKREYGLDGEVEITQEKGYGVEKLYLNGVSEGDRVVVVDDVISTGGTLVGLINALDDVGAEIEDVVVVVARGGLDRVREETGVDVKYLVRVEVSEDGVSVVESRYR

SEQ ID NO: 611 - protein, 338 aa, Methanopyrus kandleri
LYPMLRDFLVTEDAVFSVISYVHPEDGFLALMRYVKDPEGDRIRRPTGERYRKVSFEESFEILRERHPEYVRKVRGDFYDQVVPPEDVVEHLHPRDRMERILEEPRDDLEEMAARAVLELAEDSGVPESRFGVTGSLLPELHDPAESDLDLVVYGVQEFLAVRDAILRIQETGEGRDLLRALDYDQWERVYRRRSPELDFEEFLRHELRKGNRVVIGDRVCDVLLVRDESELSDVRWEEFETVEENVRLVCEVLDDSLAFDYPARWRVEAVESDTEEGYEVTEVRSYTHTYVGQAFEGEVIEVSGKLERERNSGELIAIVGSSREAEGEWIRVLKDQR

SEQ ID NO: 612 - protein, 141 aa, Methanopyrus kandleri
LIEERVEGAELRVVRLEPGERFPESVDTSRWRNSVVVSGKGSVRALRWRLGDTPVFETRGKFELISLEGLLFDDGSYHLHASVSDENGHTLSGHVKGFEVYTTVELVLLRLNARLERGRDPHTGYRELTRVIPSARDTRAR

SEQ ID NO: 613 - protein, 290 aa, Methanopyrus kandleri
VDDEFQEAGKVVKRVLRRAAREIDIGDRLLEIAEYLEECVRDQGAEPAFPVNLSLNEVAAHYTPSPDDEVEVSPGDILKVDIGAHVNGAIGDAAITLSFDNDLGERLAEAAREALEAAIETIRPGVECREVGRAIGEVCRDRGFKPVIGLTGHQIEPWNLHAGVSIPNDDLPGYEDKLEEGMVLAVEPFVTTEDGEGDVKPGSTVEIFSVRNPNQRSRLNLHRIYEDRKSLPFARRWVGKAPRVKFELLRLSKLGAVKAYPELVEVNGEPVAQWEHTVVVTERGCRVLTE

SEQ ID NO: 614 - protein, 220 aa, Methanopyrus kandleri
VETVRISVLDVVRRIADVAALSVFEVIRDGPLDVLGCTVFNIELARRLVNKGLDVRLVSSEVGGPKGLPVVEEPASDTLLVTEPLTFYSEYHLLRSHALVLMFRYGNPGFKECLRGLDCTMLLPEIEGRPLPDLHTAFVAVLQEAVTSASEGHHVVGLRVSDTSDYFIPNSDPAEVKRRDDAIVVRAIPPYRLREGRVWEAVARAVDQVRFRRVSRCFQK

SEQ ID NO: 615 - protein, 103 aa, Methanopyrus kandleri
MKKDELFLLHSVLYYVLEYLKMEGKTREDDVKLYDEFNVKPGHLHKTKLQHKCAVFLLAYVIARAISSELPKAEGLGQRLGKLLEELFEELKRRGEEVPVEPP

SEQ ID NO: 616 - protein, 471 aa, Methanopyrus kandleri
VKKDFTLDDIETTADIKIPDNPLDMVIGQDHAVEYAKLAAKQRRHLLLVGPPGVGKSMIAQGIAELLPKPREQIEVYHNPANPERPIVKVRTRDEVEKEDSDTLLSPEEVPEPVAEQLGFRCPSCGEYSDPDCRYCPRCGAQKYSARTYRATQYDRATSRQVAVIYERVGDRIRVVKPDSEGEEKKVLVPLDRKPFVQATGASETELLGDVKHCPWGGDEQLGEPPYKRVIPGAVHEAHEGVLFIDELAQLGPLQQHLLTAMQEKEYPITGKNPQSSGAAVRVEGVPCDFILVGACNIQDLPMILSPLRSRIQGEGYEVLMKTTMPDTEENRAKLAQFVAQEVERDGRIPHATREAVEEIVKEARRRARVIDGERDALTLRLRDLSGVVRLAGDLAVMEGAKYIEPKHVRAAIKKAKPVEDQIIEEYGSLEEGLRRDVATCSLSSPAAQQRVIQGDTTDSYYHQEDKRGYI

SEQ ID NO: 617 - protein, 409 aa, Methanopyrus kandleri
LSKGRTDYGNGAVKYVIRAKLRANGYVERPDVVGAIFGQTEGLLGDDLDLRRLLKTGRIGRIDVKLRNENGKTVGEIIVPSSLDRVETALVAAALEQVDRIGPCRAEVEVVSIDDIRKEKRERMIRRAREILREMVSEVTPDSSELVQKVKEAVEDVEVEEYKGLPAGPNVEDSDAIIVVEGRADVANLLRCGIKNVIAVEGTNVPEAIVELSKEKTVTAFVDGDRGGELILKELLQVADVDYVAKAPKGKEVEELTRKEIKRALERKVPVEEYLKEIGERPKDKEREKGKKPKPKKRPERRGRPRKKKARPKRGPQERRLLDRLKRLKGTFRAEFLDEGLKPVKEVELDELVEKLKSEDGVRAVVLDGVITRRLVEAAREKGVKYVVGVKEGDLDPEIKKDVKIITMS

SEQ ID NO: 618 - protein, 350 aa, Methanopyrus kandleri
LADVSVLINGYGTIGKRVADAVDAQRDMEVLGVVKTSPDYLARLAVEEYGYPLFVPEDRVERFEDAGIETEGTVEDVVLNAEDYGLDVVVDCTPEGIGARNKETLYEKAGVKAIFQGGEEAEVAEVSFVAQCNYEEALGADYVRCVSCNTTALCRTLGTLKEEFELGRVYVTIVRRAADPHQVKKGPINAIAPNPVTVPSHHGPDVKTVMPDIDITTAAVKVPTTLMHMHVVRVELKEEVTSDDVIDAFEEARRIWVVPHGEGLGSTAELIELGRDLGRKRYDLYEILVWEESINVEDGVLYYMQAVHQEADVVPENVDAIRAMTELEEDPEASMDATDSALGVLNSPPL

SEQ ID NO: 619 - protein, 341 aa, Methanopyrus kandleri
MVYTESEHRVCPKCGSTNLERDEKHGELVCRDCGTVVDYLIDYGPEWRAFNADQRAQRERTGAPISERHPHKLGDTIIDDRDTRGRRLVDWRFRRLKRWDRWISNDPVSRNIRSAVELIERVCSQANIPRSIVDEAIRIYRKAVEKDLVRGRSIENTAAAALFMACKKRKHPRTIKEIAKLFGITPKDINRTHRVLLRHLNERMPAPDPKQYLSRFATELGVSEDVEMLAREILEKAEKKGLTVSRNPAGLAGAALYLAGLLKAKEYIEEYREKMKEAESEEEKEKLERELNEKLRTCRRTQPEVAKISGVTEVTIRNRYKELAEELGLEVPDPTKIDVPA

SEQ ID NO: 620 - protein, 346 aa, Methanopyrus kandleri
VRDIGSQPAAGVRSMKVRDRALEIIRERISRGDPLYDFTGLASRPKVDAASDELRTYLSEALILPEIRELCREHFDAPEYEVLVAPRTTAAVIATILALEPRSVLHVLPEDGEAHPCVEEGCRLAGAEYEEVEESEIPDLDGFDLVVVTGCDVRWNVVSEDTLREVASAEAVTLLDDASGDRVRRLHGQKPGPRYGFDLVVTSCDKLMDGPRAGVLIGRDDLVEGVRRVCEGYGWTVDGPTLAAVKRAFEEFELSSLEARLKELERVYERLKDELDVERTGAGLVFHGVEREVEIGLGLLRRYGIMTITALGYERVDRTLRFNLLTEDAERFGYDRFVEVVKGELS

SEQ ID NO: 621 - protein, 524 aa, Methanopyrus kandleri
MEKLPGKAPAYVCQECELVTPLRRCPECGEGTDPLRVTPPAELRPVGPGYLEFIREVLVEEGLPADLVRDDELLLANRAPDLDYLDEIVAAEPVLALRYDLRKDRWTIVLKPEGARRLHELGGKSIEVDRGAAEAVREGKNLFAPGVTSADDVEPGEWVVIEHGGRPVAFGRARMSGDEMVRRNRGLAVEVRGAVEGSPTYFRGRDFEDVARAHEEYVSERLEEAVTFARENVSPSRTFASFSGGKDSLVTLVVAAEAGVERALFVDTGMELPETVEAADRAAEAVGIDVEIVEGDPEIFHRVTEALLPPSRDNRWCTLAAKLTPVTRYVRSEFGRGCYTLVGVRRYESEARSERGRVWDSDAVPGQVNVAPIFDWSSLDVWLCVHSKDLPYNPLYDEGFDRIGCYMCPASKVGDFRLSERVHPELWEGWMETLERYRERHGLPRDWLRYHVWRWLRPEGEIRKVASEESLRWGERVLGRWREVPPEEAARGFRRECPGCGYCGAVGSNRCEILEASLRRVFGR

SEQ ID NO: 622 - protein, 508 aa, Methanopyrus kandleri
LALGRPSYRGGRVSGGRDPDFAELSSSLEQDREIFHCDVWNSVVHAVSLWEAGRIDRSTAAGIVEGLVTVLEEGPDRLPEDAEDVHEAIESRLHEVVGEEAGWLQLGRSRNDQVATSVRMRLRERALDLSRELVGLGRALLDLAREHAEVPIAGYTHLKRAQPCTIGFWMSTYAAAVARSARGLLRVPGMDECPLGCSAFPGSTVPVDRHREAALLGFRKPARHCGEATALRGPILEFLGRLATAASELTRLAGDLIQLCSDELGVVEPPDELSSTSSVMPHKKNPDALELVRAELTVVAGLKGLGDAVHGKLPMFYNRDLQVLNGLLWDSVNRFELCVRVLRKVVEGLDVDEEAARGTVLGSHAAAVDLAELVAERAGLTFREAHKVVGRVSARLDREGVPMSPERADRVVEELEREGVKLRVEEVREVLSLKRTLRRPVEGSTDPGRLEVTLDRLRAELAAAERLEGTWRGRIERALRATEAAVNRLGVEGFAEVYRGYWDGEAPG

SEQ ID NO: 623 - protein, 215 aa, Methanopyrus kandleri
MALLLTLILALGFTSLPLNAPPHLSADVPDTYPWVGVYPPDVEVTYVNNWDPNLNPEHIEDWKCIAREILGDPKSWWEQYTAGTPLDELVYEAAKKIEYWVSPYDDVDPHGIKYRYYYNTRYGAWKTLQLGRGNCCDHAHVMVALCRASGIAIRYRHEVTRFPCWGTCDHVCVEVGLPENVVDGKSQDVKWVRMDPTNPNSQCVRLKATYPNLPF

SEQ ID NO: 624 - protein, 243 aa, Methanopyrus kandleri
LTFVTPRVSPTESDIEVGSWKEIEEIVSSLSSGLVRITTRDHEDIYDCFFIVEGGAVVGAYLGRIRAEELSAEEAVRAIRDVVDSVGFALLDVYELEPELLELIKRVNDECLLKEPFTPTEVEEAAPEVEEPERDELLEKLGVDLDAIYESVEAVLEDYFEEEDPFEEFKRMLRALGTQDARVYLRVKVPEGVDERMLEEVRRDLEHALSEFSIDGVEITPSLKEKETVTLRIRDIMKRIRGG

SEQ ID NO: 625 - protein, 315 aa, Methanopyrus kandleri
VSVNENALPLVERMIERAELLNVEVQELENGTTVIDCGVEAAGGFEAGLLFSEVCMGGLATVELTEFEHDGLCLPAVQVTTDHPAVSTLAAQKAGWQVQVGDYFAMGSGPARALALKPKETYEEIDYEDDADVAILCLESSELPDEDVAEHVADECGVDPENLYLLVAPTASIVGSVQVSARVVETGLYKLLEVLEYDVTRVKYATGTAPIAPVADDDGEAMGRTNDCILYGGTVYLYVEGDDELPEVVEELPSEASEDYGKPFMKIFEEADYDFYKIDPGVFAPARVVVNDLSTGKTYTAGEINVDVLKESFGL

SEQ ID NO: 626 - protein, 304 aa, Methanopyrus kandleri
MALWLDVPVAPTDSFYRKLFEAVWRILGDRARGIASERLPALRRCYTVSPDSSTFLSENVPGVRLLDEFRPGELLEEILSETVSGELGRRFWGSLVVSVVERGDVAGLEAMKRSIEALRAVDVTPWLDALALDVLVALAEDVGEDILGDSLQLVAERLDVDEDGVLRVSPLALEFAGYCFEMILLGYVVAYRKPEEIEVVSCDVFAVEDVRRDIERRISEVKSGDLELAAEVIEEVLAPYLRVVTDVRGYLEEARSMDPSIALEVDGFSVSIAPKELDPEWDRHVQEAIEKLTGSGGKARRVFN

SEQ ID NO: 627 - protein, 132 aa, M. kandleri
  MISC_FEATURE: selencysteine
  MISC_FEATURE (15)..(66): selencysteine
MSEESVVVAFCCYEXGYGAADLAGTGRAQYPSSVRIVRVPCTGRVGIEHILTALAKGAWTVFVAGXKKGECSYEDGNLKCERRVQAAKKLLEELGIEPERVEIYFMSSAEADKFVAAVKEMHERAKELGPLA

SEQ ID NO: 628 - protein, 428 aa, Methanopyrus kandleri
VKRVELEGIPEVRGTVCPPPSKSGSHRALIAASLCDGSTELWNVLDAEDVRATLRLCRMLGAEVDVDGEERLEATVSGFGDSPRAPEDVVDCGNSGTTLRLGCGLAALVEGTTILTGDDSLRSRPVGDLLAALRSLGVDARGRVVRGEEYPPVVISGRPLRERVAVYGDVSSQFVSALLFLGAGLGALRVDVVGDLRSRPYVDMTVETLERFGVSVVREGSSFEVEGRPRSPGKLRVENDWSSAGYFVALGAIGGEMRIEGVDLDSSHPDRRIVEITREMGAEVRRIDGGIVVRSTGRLEGVEVDLSDSPDLVPTVAAMACFAEGVTRIENVGHLRYKEVDRLRALAAELPKFGVEVREGKDWLEIVGGEPVGARVDSRGDHRMAMALAVVGAFARGKTVVERADAVSISYPRFWEDLASVGVPVHSV

SEQ ID NO: 629 - protein, 147 aa, Methanopyrus kandleri
LTEIARAATRYEPEETAALRIATWYLVRRSLDFEAPATLFWAGRTYARALLRVYHVLSIREFLTCIERVLGTSYDLNEDVVVAAPCPECAGFPRGYESVCDATRGFIHETLAAFGREPHKVREAKCAVRAGELVNACAFEIRHSNLH

SEQ ID NO: 630 - protein, 135 aa, Methanopyrus kandleri
VDLTEETLLRGAEATAEAFAPYELLTYDRLTRIALIEVARETGTAALFEAGRRLVRILGGDDLESVLCAFAEVFGAEVEVEGDTVTVRKCPECAGLRGIDGPVCHLTRGFITEAYRLEIGRPVTVAETRCRAAGD

SEQ ID NO: 631 - protein, 386 aa, Methanopyrus kandleri
VNTLGRLFRVTTWGESHGPALGAVVDGCPAGLPLSEDDVQRELDRRRPGQSGVSTPRSERDRVEILSGVHEGRTLGTPISMIVWNEDVDSSKYEPIRTRPRPGHADVTYRWKYGHVDYRGGGRASGRTTVGIVMGGAVAKKLLREAPSNDPLGIEIVGHVVRVGSVEADPGDLSAEEIMQYAESNPVRCADPDAAEEMLGEIERARENGDSVGGTIEVIAENVPPGLGDPVFGRLDGELAGALMNIPAVKAVEVGSGVRCSEMHGSEHNDPIWWDGHPVVDGDNSGGVLGGISHGGRLVVRVHVKPTPSVSVPQRTVDLESEEEVEIEVEGRHDPCICPRAVPVAESVVAIVLADAVLRAGYVNPDSVELPAASVEDRWRTLKRHL

SEQ ID NO: 632 - protein, 291 aa, Methanopyrus kandleri
MPGCGIGHGDDPTQRSGRDEPARHVGADGSNREAGCLLARELGDDLESTLTTFADLTGCEVDADEDVVTVRNYPECAGYPGARGPVCHFMRGLIAGAHELETGERTPVEEVRCRAAGDDVCEFRIGRKPREPTVPRLDGLDERALRRMAHAASEREPEEVAAFKLASEYTLKFHPADAAAPIFFRAGRLYARALLRLYNPLEMTSFLSIVEDVTGAECHLGEGNRMSIEPCPECAGFPREHEPVCHGVRGALHETLGTFGKEVERVEETECAAVTGELVGRCEFRFELRGL

SEQ ID NO: 633 - protein, 383 aa, Methanopyrus kandleri
LEKLVLLPGPVMVHEDVLLRSAKQVMNHRSEEFEEILTECVELSKYLFQTDGNVAIITGSGTAAMEAAIYSLLEPGEEVVAVVNGKFGERFADIAERRGAEVRRVEFEWGKVADPERVEEALADSDAEVVTLVHNETSTTVLNPAEEIARICREYDALFVVDAISSLGGVEFRMDDWGVDVCVTGSQKVLGCPPGLALVAVNDRALEVMEEKDAGSYYLDIPKYLEYLEKDPKQTPYTPAVNAFYALHEALKRLKEEGLEARWERYRLMQRIVREGIRALGLELFVEDDEIASPTVTGVTYPEGVDDREFRGEILRDRYDVVVAGGQDHLAGEIFRIGHMGEVRIRDMITAVTCIGLGMRELGVDVDVGAAAEAMADVLSEVS

SEQ ID NO: 634 - protein, 257 aa, Methanopyrus kandleri
MRRLPRGVLCVGLRAVAFSADLSEDDVRVSRGLLRRVERDLKELRRGFRDELMYVVLGPVCGDDLAVVYVVEEGALEDVNAAVFDLFREYGGEDVMGVSESPEGAGEGPSYAEAACPESEYQDVVVTLFDTYAAENRVAEVAEVCRRAAEGLCYDVGGGPVQEPMEIPGVGYVGPETDDPVLIATTERLDQVGPTAGAILGAGRGAGARPVRRGAPAEVLPGTVIFSVAIVLNGNVIDGVRALEEGTGTERWPLRYL

SEQ ID NO: 635 - protein, 212 aa, Methanopyrus kandleri
LVTVLEEEDPHAVKHVVRALRAGKLVAIPCDTVYSLSCDATNSEAVRRLYAAKERPKDKPVSVAVHSPEKALELLEPVPRLEAALETLTPGPVTIVAPRRPGVVAPEVAAGRRTLGVRIPDHPFFLRVVRRFGKPIVTTSANVSGRPAPTDPDEVFEQLGDRLDILVEGECRFGEPSTVIELTPEGNIDILREGAMPKEEILETLRGTTSGA

SEQ ID NO: 636 - protein, 152 aa, Methanopyrus kandleri
VPEKGLKPFLTGFRETVLDLTDGEGVLVYSGCAGTCTPFAELLAFTLRGTDLEQYYSIDLRREYLRMELRDHGYTVTDEREELESADVVVLLGGLAMPISDATPDDAREFLEELGNPPLVGVCFMNMFERAGWTDELDFHTIIDGYLEVTVK

SEQ ID NO: 637 - protein, 225 aa, Methanopyrus kandleri
VIEKEPVPLQVGDYRLYFRLWALGDADAISDVLYRELYPHEWLEGSREVVDVGAHVGAFTVLAAAHGAREILAIEPHPDNAELLRRNVEENDLNAEVVEAAAYDREDVVKMYLSPSTVAHSVELVRSRETIDVETVALDDLGTSPDLIKIDAEGAEERVLRGAERTLEEHAPVLLISAYHYPGQEEDLRRWLEDRNYRVEVLVRETSPYRSPALRVPVIVAEPRA

SEQ ID NO: 638 - protein, 169 aa, Methanopyrus kandleri
LIVLHARDCDPKACTALRAHRMGLVELTRHPGDVPTGAVVLDPTVEKALSREDRDAALERGLVAVDCSWEHVHRYFGPLRRRCRHRILPYLIAANPVNYGKPCKLSTVEALAAALYILGFRREAEEFISRFKWGPAFLELNRERLEAYRRAETSAEVVRVQEEFLPDGL

SEQ ID NO: 639 - protein, 513 aa, Methanopyrus kandleri
VGGNAYIAVTGTDAALNPVVEIWTAPTTSVITVIPPNPTVPVTMAGTISGVKLTKIDATHLLLAILGTNAYAVLDITNPSSPSLTVVRTLAPPAGFTNVVIDDADGPYIVAHDSANPASAVVFKIAADGSVTDSLTFSVTAGNQPATISMYYGGSPMYLLVTDTSGECYLVKDGSLSVVPLLRTLSVGATPIFATKQFVFVGSGGMAYNVYWVLPTIRTHRQMIPIPPGWMGMVPNVVVLEVPEVSGEDNIGIDEEVPGFYGFQLKTPTVPAQVTYSSGQIVAQATGGVSSDMVSEVYPTAYGIVLNTWPNAIPALVIDIANMDCYLAVVVHNVTIDLSAETISVTPESPTYKIVGAITVKASWEDLFGMAHQKTLDLTGRLSATNPDGTPVGGITYDPVTGLVTIIGAKEPKVLVKIDLNDYLEGLRTVALGTGVPPVTSLEQRVSNLEHAVSTLSAQIGSMSSEIANIKSDINNINAEIQEIKNGMKKGVPVSPMVVLAGLLAALAVLRRR

SEQ ID NO: 640 - protein, 161 aa, Methanopyrus kandleri
LGNLPRPAAWLAALTAVLLAVVGPAHGLTQTNAALNPQPVQGLNVEGASKPTSLVIDNSGNLGAVEAGNPPTQAWTTAPIVATVYTQPKVAKAEMVGGNIDFTVSRHRHHDRYDLQVHRHRDHQREHTDGIDRPADHTDFVPRCAHRHNHTDGLPPARSGR

SEQ ID NO: 641 - protein, 49 aa, Methanopyrus kandleri
MAKFPEAEARIFNKLICMKCNARNPPDATKCRKCGYKGLRPKAREPRGG

SEQ ID NO: 642 - protein, 239 aa, Methanopyrus kandleri
MGVFGYLRERTPCHLTLLDPVDVGPEEVPEVLESLVKAGTDAVMVGGSTAHASQVEAVVEAIREVADVPVILFPNGPEGLAPNADAVLFMSLLNSRNTYYLIEAQVKGAPLVERFGLESIPTGYLIVGEWGTTVSVVGDARVIPFDRVEVIVAYALAAKHLGMKAVYLEAGSGAPEPVPPEVVRRVSGIGVFTIVGGGIRSPETARELAEAGADAIVTGTAVERDPDLAAEIVEAIKDL

SEQ ID NO: 643 - protein, 135 aa, Methanopyrus kandleri
VEYPSIPRTLRLIMWAAYWINAVSVIATILLSRSRLNVPPEQTYSFLAIAVVFLAALGRALQRITGRRVVLTRDAVKFDGERIPYGDIEDVRVVEAGAVSVVEIRTTDGRVHRLRVADPDRFLRDLVGLLRFKGP

SEQ ID NO: 644 - protein, 225 aa, Methanopyrus kandleri
LRAVALLSGGKDSTLAAHLAVEEGYELTHGLTVVPSDPESMMFHVPNADLGALVAQVMGLEPVRIRSGRDDEADIEEIARVLEGLDVDALVSGAIASRYQKERLDRLCEELGIEHVHPLWGMDPFEELELLVERGFEVMIIGVSAAGMDESWLGRRIDEDFIEDIRRLYEKYRIHPAGEGGEYETLVLDAPLFERRIVLERVEKRWDGFSGELIVEEARLMPKRR

SEQ ID NO: 645 - protein, 350 aa, Methanopyrus kandleri
VGRDEGEDKFDGGDEGTSDEPDVPEIRLDGESDGPDHDHPEGPDSDSEPQYPQNILSHEGDHTDIDVSNTNISTAESDLEADLDSNSYSESSSESDATQYTAQYSDLDQDTDQIQDSRSESISDVESVQESSSESNPDVDVNVDNVVDVDDPADPGVIYDVDREVNVDDRDTYVEENVYYGDTDRTIYDPRTDSDTGSVDPSSDPTTAGDQVVVGSEDPYMVLDTQKGQVDVLVGEDPTTINMGQSELSQLLDLVNWLDGNAPSDVLDLLYQLLAYLLETFYGLIPLDNILNMIQQIAEYALSGELGLDVLNQLLGVLETATSPLYAATEILKFLGDLDLGLDALLDIDI

SEQ ID NO: 646 - protein, 73 aa, Methanopyrus kandleri
LSRNVLRNRGQGGVEYLLLAAAICVWAFLEISVLWWVMAKDAGRAAQEAAKMAAEMARQKGVEIVEKYANAIT

SEQ ID NO: 647 - protein, 232 aa, Methanopyrus kandleri
MAGLPTARPDATPVRAPERIRVPEPPRDPVEQARVLRVLLETVRRGVLPFLGASYRSVNGKVYGPYYEARWKPRKGERGRTIYLGKSENESVRFLEAWLWEVRRAAPRLAEHRKAKWFVARAVRRALAALLARFEGDPEEALELAGEVLRKVGGILTGMPFDPLRTYSRPRGGRKLLRMLLGRTPGEFRDVLLEMLSPWPPWYCLTLLERLHGRTAAREYHRARVPRPGSAA

SEQ ID NO: 648 - protein, 762 aa, Methanopyrus kandleri
MRTWKIRVRGIVQGVGFRPFVYRLCTEMELDGHVRNLGSEVEIVVKATCDELEELIRRLKEEHPPLARVREVHAEETEEDVGPGFRIVESEESEDVELQIPPDAPVCEECLEEIFDPKSRRYLYPFTGCTNCGPRFTIIEGIPYDRENTTMVDFPLCEECRREFEDPEDRRYHAQVVCCPRCGPRYRLLDADGEVVEGEELEAIREACELIEEGKIVAIKGIGGFHLACKTTEDEPVAKLRERLGRPQQPFAVMSGSLDDVRTFAEVDGTAEDLLTGPVRPIVVLPKKEPFPLSELVAPGLHTVGVMLPYTGLHHIMFERFLDEPAIVMTSANPPGEPMAIRNSDALRHLRGIADYYLVHDRRIAARCDDSVVRVLDGRPRSLRRSRGYVPEPIELEWAPDDLTVVAVGPELDVTACVLHRGKAYPTQHIGNTSRAQTLDFLQETVERFLRLLRLDWNDVDAVACDLHPSFATTGLARRWAEEHDLELVRVQHHHAHALACLAEHGLDPAEEPAIAAAMDGYGYGDDGSAWGGEILYVDGNEYERIGHLEPVSMPGGDAATYRPLRMTAAHLHAAGWSEEEIREFLLRRLEEWPHALKHGEREVEVILHQIEHPTIETTSAGRFLDAVSAALGVCHERTYEGEPAMKLEAVAVRVDHAPEPDVDVRNGSVRVSSVVARAAETGDLRYALTAHHALIEGFAEVIDEHRDGEPVAITGGVFNNELITRGFRELYGADLLEHHEVPAGDGGVSLGQVVAAVLELR

SEQ ID NO: 649 - protein, 374 aa, Methanopyrus kandleri
LDHDAVAMLMEVRADLKEVKALYQRLARIIRQAGLTNDYEYIISTAAALLVHDKYEKAREVLSGLKNPREGAMLTMAALREASLLDEILGEHTVEPAELVVNGVGSFDEALKKLDEYLVGEGEVRRQPGPDMSYLRATDGAISNHLLGRTVGYTLNTTPRDYAEFVENSVHAFAYARLLPSHQWRVRLSLEPYVTNPLSPPSLMRTLELVDELRDPELVMSELDVSENTFLRYYKTLVRYLLVHPDHEICEPTELGERALDDEEVLAEIVLKRGFWAILSKHPNGGSVAEKLAKRSVVNRKMKWKDEVDISLLVDAASDTDRAEAELPVVLAVHAEELSTVHLAARAGVSTGVAAEVLYEHFPEQDWEGERFGL

SEQ ID NO: 650 - protein, 405 aa, Methanopyrus kandleri
VGGRPGVDCGGFCRYCYFRGVDWEEKRPFGCKNCPPGSPGCDYCGRSVWEDNGPFRPPGVVLQEVGMSLGFRREREATVSGGGDISNYPWLRELVASLRDLGIRSVQLGYTSGKGFEDPEEVEELCDLGVRSVSYTVFAWDPELRREWMGDRSPEASLACLEVFADRCEEVMVAAVLIPGVNDGDVLWKTCERLEELGIDALLLMRLGTREEHGIILGNSLVLDVKPHSLDEFKRIVTEVHEEFPFRVTGTPLWDPETSAPFALRTLGEELRELLPPVEVECSLITGRVAAPLIREVFRHVEGGEKVDVVPVEKDVACLITERDLERLDVSSLKRTVVLPGRALVHDARAEELLKRDGFERVVLRGPDRLTLDGEASCEVDREEVLEFELNAFRDLINTVNILGE

SEQ ID NO: 651 - protein, 444 aa, Methanopyrus kandleri
MAREAKDTVDLYDDRGNCVAEEVPIEVLSPMRNEAIQSIVNDIKRTVAIDLEGIENALQNATVGGKGMKIPGREMDVDIVDNAEAIADEIEKMIRVYEDDDTNVEPMYDGKRLLVQLPSERVKVMADPYSGTLQAGMAVVHAIIDVCEVDMWDANMVKAAVFGRYPQTIDYFGGNVASMLDVPMKQEGVGYALRNIMVNHIVAATRKNTMQAVCLAATLEQTAMFEMGDALGPFERLHLLGYAYQGLNADNMVYDIVKKHGKEGTVGTVVREVVERALEDGVIEVKEELPSGFKVYKANDMDLWNAYAAAGLVAAVMVNQGAARAAQGVSATILYYNDLLEYETGLPGVDFGRAEGTAVGFSFFSHSIYGGGGPGIFHGNHIVTRHSKGFAIPPVAAAMALDAGTQMFSPEVTSKLIGDVFGEIDEFREPMKYITEAAAEEAKR

SEQ ID NO: 652 - protein, 173 aa, Methanopyrus kandleri
MLERKIPEGAKPEVQIFPQRLLSADTTEKLLNELLERVEGIGRIVIHGPGLPKAVPFGPARGKPVKHPERRPIEVHGEKIPMKVQTGQIIVEIEDEDRLDDIVEEIEKICREILPCDFEVQVGRFTRHKPTVTDYLKFGEEGVKKLDKRLLGLVEPRARLADRVSVLKKKGED

SEQ ID NO: 653 - protein, 202 aa, Methanopyrus kandleri
VGRETYAVDCRAAMGMGKGGSLAQRGTIAETEITEVVAVAMSPGSRHITKPVCEITYALREAGIHTSVLVLNAGSGVPAEAPVQTGATMGIEPEEIERINRHEVAVIHLGNVKQHIVWKARLILKHCDVPAVIVCQTPVDFEDFAEVGCRTRIVEPPEPETVGEVVEIVTGVIRGETVPSDKINEIVRKVRRALRYARRRSR

SEQ ID NO: 654 - protein, 257 aa, Methanopyrus kandleri
MAEKAQFYPGETDVAENRRKYMNPNYELKKLREIPDEDIVRLMGHREPGEEYPSVHPPLEEMEEPECPIRELVEPTEGAKAGDRIRYIQFTDSVYFAPIHPYIRARMYMWRYRGVDTGSLSGRQIIEVRERDLEKIAKELLETEIFDPARSGVRGATVHGHALRLDENGLMFDALRRYRLNEETGEVEYVKDQVGIELDEPIPVGAPADEDDLKERTTIYRIDGTPYREDEELLQVVQRIHELRTLAGYRPEEAEGK

SEQ ID NO: 655 - protein, 553 aa, Methanopyrus kandleri
MSSAEEKLFMKALKEKFEESPEEKYTKFYIFGGWKQSERKKEFKEWADKIVEERGVPHYNPDIGVPLGQRKLMSYQVSGTDVFVEGDDLHFVNNAAMQQMWDDIRRTVIVGMDTAHRVLERRLGKEVTPETINEYMETLNHALPGGAVVQEHMVEIHPGLTWDCYAKIITGDLELADEIDDKFLIDIEKLFPEEQAEQLIKAIGNRTYQVCRMPTIVGHVCDGATMYRWAAMQIAMSFICAYKIAAGEAAVSDFAFASKHAEVINMGEMLPARRARGENEPGGVPFGVLADCVQTMRKYPDDPAKVALEVIAAGAMLYDQIWLGSYMSGGVGFTQYATAVYTDNILDDYVYYGLEYVEDKYGIAEAEPSMDVVKDVATEVTLYGLEQYERYPAAMETHFGGSQRAAVCAAAAGCSTAFATGHAQAGLNGWYLSQILHKEGHGRLGFYGYALQDQCGAANSLSVRSDEGLPLELRGPNYPNYAMNVGHLGEYAGIVQAAHAARGDAFCVHPVIKVAFADENLVFDFTEPRKEFAKGALREFEPAGERDLIVPAE

SEQ ID NO: 656 - protein, 298 aa, Methanopyrus kandleri
LVGFTEIGLAAAMGALATIAGAFEDAESDVGSQSNPNSQVQLAPQMMNFHRYFNKAISGEPVSYMLYGAIAGTVTWVMMTKFGLPFLAAAAVGVGVNALIHMVFATTAHLGRMASAAEFGHPIYLDVVLSHLGPIAGFGGIATFAIVSLAYIQWALLKHPFPLPLLAALWGVTVGAIGSSTGDVHYGAERLYQHYPFGGGVPVAAHGNITRKAETGIRNSMDSVYFCAKFGNPLTGLCFGLVVFFSTWAGLFGQWGAVIAMGLVTLGCLIVSNRVEKKARESYGTYEDVEMDEICDPV

SEQ ID NO: 657 - protein, 225 aa, Methanopyrus kandleri
VDKLIAVLVLITLGSIMVNVGVHYVPVGGAPAAMATATGVGTGTTQLAAGSGLTGLITAAAMSQKPFLVILWNGALGAATMMAITMLVGNFIYVYGVGCPPCSAKVDKDPITGWDQEAYVTPGTEGHGIPTVSFVSGILGGLLGGSGGAMVYYALYKVLGMSAALAGILAMGFFYANAVLASYNIGGTIEGYHDPKFTRLPKAVVCSLVFGIVASVIAYYLSTLM

SEQ ID NO: 658 - protein, 270 aa, Methanopyrus kandleri
LILRTLLISAVAPGGEEEEVEVAVAISPLKLMTAGLICGILGTAFAWVHPLIPALAVIPVVVWGADAVRRVAGYGLGTGVPSIGFMGLGGGSVAAILAAALSGNTVPAWAAAIIGTVIGAVVGALLGVLDRRVIKMKIPVMERCSTEIVASGTLALICLMAAVAGDFTWSAVYSKVIATGLIAVLWAICAISLLHPFNACLGPSETQERTLWLGAECGSLCTVVAGLATANPVVLLAGAAAWLITFWKFWELTKRDAADVVWTGIVPKGE

SEQ ID NO: 659 - protein, 112 aa, Methanopyrus kandleri
LAIVLIDPESQIAMDAVTGAVAEWSEDVVTLDVMPLYEKVEELEQYVNDMMRAMDPSTTTWGTLPGREGVHETAGFLTNFAHGFVIGTMIVALVAFTLAAVYKLHALRLLGL

SEQ ID NO: 660 - protein, 252 aa, Methanopyrus kandleri
VLEVPEKAEPAEGWPVVEGDYVVGDPEAPVHVVTLGSHIEEDILKAAGEDKVAIAGPCKTENIGIEKVIANVIANPNIRFGVLCGAEVTGHLTGQCFKAMYENGVDPDSGEIIGAEGAIPYLENIPEEAVERYRDQIVELVDLIDVEDVDEIVKAIEECVEKDPGAYEEGPMTISLEEEEEEELAEVAGMPVSAETVTVEYRINDVRVGVKSIGAMQRYMAGYLSGRTMGLLIGIISGMIFLFLPMVVLGGV

SEQ ID NO: 661 - protein, 74 aa, Methanopyrus kandleri
LAEEESVPKMVAPEDDIREIHSRLDEIERRLDFVWGEVYQRFGKRIGRDIGILYGLVIGLYLCMLYILLGVAFR

SEQ ID NO: 662 - protein, 322 aa, Methanopyrus kandleri
LFYYPGKEQKVCDICGVKVGGQPGEYPTVLAGTIFYAGHKIVKDEDKGIFDEEAAEELIKMEEELADETGNPMMAHIMGESEEAIIRYLDWVADVTDAPIIVDSTEAEVKVAAVKHAQEVGLAERVVYNSINASVEDEEIQAIKESDCNSAIVLAFNPMDASVEGRMKILTEGEEGVSEKGMLEISDECGIENPLIDTAYTPFGSGAGTAYKVTLAVKAKLGLPVGGAPHNVPSAWDWLRDFMKKLKEEGKEEWAELAHESSDWGSNVVAATLCCDYLLFGPIENAPAIWPVVAMVDALIVEANEDVGVEPQVEEHPANIVR

SEQ ID NO: 663 - protein, 491 aa, Methanopyrus kandleri
VLPTPGVPRLELEEELRKHVPDEAKEFVRSVLSRLLACEREIDRTLEALDGCYVEPGPAGNPTRGDVDVLPTGKNFYSVDPRKVPTRRAWKVGKKLAENTIERYLEEHGRYPESVGIVLWASDVMRTGGEVLSQVMWLLGVRPEWDESGIVSGFEVVPLEELERPRIDVVVRISGMFRDAFPNLVKFLDEVFEAVRELDEPEGWNFVRKHALDHRIFGDPPGAYGAGVNYAVHASAWDDRSDLADVYVRWGGYAYGSDVYGEEAFSEFRRALSTVRAVSVNQSSHEWDVLSCCCHFAFHGGMVAAAEHHSGERVECYHHDTTDPHRVITRPIEEELVRLVEQKLANDEWIEAMLEHGAKGVGEWLKRVENLFGWDATTGRVPSECYEKIEDVLERYGPRFSDENPYAVEYARERLLEAKKTGSVALADDVGRVLLHLRLDADVLVGLDDQRVDHGDDRPDRRRVLDRTEQQVVAAQRRRHYVGAPVGGLVG

SEQ ID NO: 664 - protein, 573 aa, Methanopyrus kandleri
LRVLCVCSGTMLKAARDVAERFSELKIDVAYQDDPIDPNRYDLIVLLKVTNVNLPTDHDAEVVAVPLDGSTGIQHLNTAPSSVVERAAEYLEKGGKENLENERGFESFEKLGVPVLNAVVSWYTDRDGWRESEGGLSPADVAYGISLAELQGRIDPVLVGTKRDRGEFEPLPERCRLAARRAIRWARLRRKDPAERRVAVVLNNGICSGGEARIGAAMGLDTFESLARLLQHMAEEGYRLDWVPRDGRELEREFFRRKAFDEFKRTRVEDIVASGGAVDLVPLDRYLEWFEELPEELQERMVETWGEPPGDSMVLDDHLVIAGIRTGNVFLTVQPKRGCAGTECNGDVCKILHDPHCPPTHHYYAFYRWIRDEFRADVLLHAGTHGTLEWLPGKSVGLSRECWPEVCLGDLPVVYWYIVSNPSEGVQAKRRGYSTLVDHCPPPMGTTEAGLEELEERLEEALRDPDREDRRLFEEWEVRSGAFIEKGLHVIGEPAYDPERLSEFLFALCRNRLRELIAESAGLDLEELTERPEAENDLFGATNAEVLRALDAVIRGLCEETVSEAHHGPDRKG

SEQ ID NO: 665 - protein, 478 aa, Methanopyrus kandleri
MGLFSKLFRRGPKPQIAESERVTGPLAVSRDYYIVASVELGNTTTKCILTATDLKEGVTYLIHKEVRMTRDVRPPRSGEEVFGKTVWGVELTRDSVAEMVADTLKSAVKNANIKIDDVHFVVRSTGVTAGFASPEEVGEMIKALADGCLKAGVPPNRMTAAMSKEQIPEPFREHSLIDKVYFDGAVTGVKPPAGKEVVANEMEGELVMAGIKVGAKSTKVDFRNPCMAIDYGTTLAGRITNDELPYADTIGNLCGLAGAIMDAIARGCGEIDEEIGCALDLPSDVEPDVGEKARELAEEAHEYIDIREIPANRERFGTVPVNPKAAKKAGLKLLGCDVGENGSDLSRLTEIGREAYEEGGYELLFGVLDWTATLIAKRLIETALDLDLIDENTAIGITGRAGTTGKKPELICRMIAEEFGDYWDPEEDLVFVDDGLARGAATMARCMNCLGTPENPLGGNRGGGCILGLRIKHQQEGS

SEQ ID NO: 666 - protein, 142 aa, Methanopyrus kandleri
LLRRDAWRQARFVHPRSYREKILRSLFFALTARINQMRRLDPEEYPEDPIEGYDRFLEIVREYAEDPDYDSPLLLLYESLSAAYAIFLRGEPVHPPGTEFPGVGKVRRTDDCYYCPIKERREDQPGSFCTLCPAEQDPEVVS

SEQ ID NO: 667 - protein, 304 aa, Methanopyrus kandleri
VRPVVTVVGSHPVGHEPTLKDRLLEKLRRRSAYAPAIHEAVRDQTEAGVELVSDGQVRGDMIEIFASHIPGMTVEDGPAVIGRVEPPRFSPLVLDYREATRVAGEVEVKAILTGPVTLCYSLEVRTDLYPSNDHSSLLKDVARALSAEARLLRREGASVLQVDEPILSAGVTSVKKVARYVNTVLKAFKGGTRVLHVCGDVTEVYLDLEENIDADVFDHEFAGHPENLEVVAEGDSPIGVGVVRSDTDRVESLDEVVGLLEKAREAMGDRIEFVDPDCGLRKLPREIAKKKLEVVRKARDRVFR

SEQ ID NO: 668 - protein, 103 aa, Methanopyrus kandleri
VLTVTDIVEKIAEILERGDGRYLIMGMVQAHGLGLRSLADSVDVPVEVLATIEIEGFGKVPHKSLVRKLAEWIEERDLDPEDLVKAGWARFELEYFEPELWRR

SEQ ID NO: 669 - protein, 179 aa, Methanopyrus kandleri
LVVNPSTAEAATVILVGKKYGDVVGTALGLFFGVLLVILTAAVYIRVKGTDVFVSKRRDRLPLLTVGAIYHAIGALVMCKVGVTRPMVCLMLTYAIAAMAVAGVTRFWKISIHAASMGTVMGAIAWLGEWWAGIPWSIVTAVVCWARLKLNAHTGYQVAVGVAGGTLLTYVLMITLIPR

SEQ ID NO: 670 - protein, 137 aa, Methanopyrus kandleri
MKAETYALLAALLWGLAPVIEKVGLRGMDPMTATLIRSLAAVAFLAVVCLAVGRSQVGGLKYVGYMIVGGILAGGLGLYLYYLALSSGQASRIVPLSSTYPLFATLFSILALRERPSVETVVGCILIVIGAVLVSRE

SEQ ID NO: 671 - protein, 81 aa, Methanopyrus kandleri
LQFNRVRLEGEREELEIRIGSANVKRKLAMLIREGDLVLEERRELEPHEEVEVLAGYEEPEEGVPTERLKVLRVKRVEFVG

SEQ ID NO: 672 - protein, 431 aa, Methanopyrus kandleri
MRGLIPDHMLERGRTVLDSYREPVERLLSERRMPEEGWPDDVIATFLWELSRMDTDKDPKAARIGEREARVASRLAEESVFGFCHGVGRSGTLVDPQPKAPGASIMYALTNRLVTDFLRRLGFRIEGAFVVPGATGLSIALCLSALGEGEEVIYPYAAHKSPIKAVRLAGFGMRVVDTEIEGDRIVVDPGDVEEALERSESPAAVLSTLTFFPPRSSDPLPEIAELCEEYGVPHVVNAAYGIQHEQYRDLLNRAIKRGRVDVVVSSTDKNLLTPVGGGIVYAPDEETLREVSRAYPGRASAAPVAHALISLLSLGMKGYRRLMRRQKECKALLDELLEDLEARRDDVRVLDVDNPIASAVAVEGHDPVDLAARLYVRRVTGPRGVRADDPFGTSRLRGYHSNYITINAAIGVREEDVKTAVERLERELEGE

SEQ ID NO: 673 - protein, 307 aa, Methanopyrus kandleri
MRYVEEFRERLERIFGDRAEDVYRYLLEGRPPTYVRVNTLKADVEEVVENLETAGVELAETPLSYAFRVLSSPGPLGSSLEHVAGYLYLQDLASMVPPELLDPEPPGPVIDLCAAPGSKTTQLAQLLGGEGVVLAVDADPRRVRALVHNVNRLGCVNVIVAHADAARLRISAPFLLLDPPCSGEGTLHRDPHALRTWTPKKPGRFARTQLRLLRAALRMLPPGGRLVYSTCTFSVEENELVIHEALGNDDRYRIVPSVPRWLEPHTVPGLTEWEGRELREDLRHAFRIDPASLESDGFFVAVIERRH

SEQ ID NO: 674 - protein, 368 aa, Methanopyrus kandleri
VAGDNEATEVDKRDIALLRALEGLSRAFEWVPEDKLLERLPMDYSELATRLEKLDSLGLIDYRYIPTYQTYAARMKERAYDTLALWDMKKHDVYERLGTIIGEGKEATIVNAKDPEDEWVAIKLHRYHAPEFRRIKKTLAYAAVKVRGEELRVDDHRIDVPRAKAQVEMKVLQRLHSKGFPVPGPRAINRHAVAMDMIEGHAPGIPAPLLAKIKVKNPEEALEVILEDYREIVLEGHYVHGDFSEHNILVTPDGELYYVDWPQAVPIEHPSAPKLCYRDLKNVIEHFRRKYRIRVPDPKEVYDEIADDLQSLMEEKKEEYERHKKAAERTLERFEESVERVEGKREGRKAGPTEDEEDRVPGGGDGGG

SEQ ID NO: 675 - protein, 235 aa, Methanopyrus kandleri
VKVVRPDRRRTRRTGFPEVVMAEGKTPEQVSEALEALLRSEGIAIASRVDPELLDDLEIPEDADVEYDEAGRVLVLKDPEYEPPYRGGRVGAVAAGTSDLPYLSECATVLEALGIEVHTEIDVGVAGPHRLLAAVRRLRKFRPHAVVAAAGMDGTMPVALNAMLDVPVIGLPTPVGYGLGGSGEAALLGMLQSCSPGLVVVNVANGIGAAAAAVKIVRVCLEGEKPSKKPRNSRR

SEQ ID NO: 676 - protein, 400 aa, Methanopyrus kandleri
MEKPSRNTYIPLTIVGECPECREYHRGRECPECGQDLRRPRLRPQFGGRGPHTLFYLEKYDWDTMKAVRRIAQALRKHHRHFGIAGMKDKRAVTSQRVTVRGVPPGVLARLRIRDLKIVPMGRARRKLRPGDLWGNRFVITVRGAKVRRLPEALRTVRELGGVPNYYGLQRFGSRRPVTHVVGKYVVLEDWEKAVKTFLTLEYPRESPEALEARRWLKEHWGEFKEALRRFPKFLDYERHILEHLARHPHDYINAFRRLPMWIRRMFVHAYQSYLFNRILSERIARGLPVHRPVEGDVTQDGLPTVPLPGFRTELSDGPQGEIEREVLEEEGVRLEDFEIKSMPELSAGGDRKPALLRVYGLRAEAIGDDTVRFTFSLPRGGYATTVLRELLGSEGVYAD

SEQ ID NO: 677 - protein, 54 aa, Methanopyrus kandleri
MVKSSHVPIVSPNDPAVVCPNCTKEEYKRAKRERGKLRFAGLCEECGSAAFYEY

SEQ ID NO: 678 - protein, 339 aa, Methanopyrus kandleri
LSVLERIIRGSDLDREEARDLMCRIVGGELSDVEVAGILVALRCKGYTSEELVGFVDGMMEHAVKVDPDVERLVDTAGTGGDELDTFNASTLAGLTAAAAGVPVAKHGNRSVTSECGSADILEALGVNIEADPDTVKRCIEEVGFGFMFAPKFHPAMKNVMPVRRKLGIRTVFNVLGPLTNPARERVTGQVIGVYSENLLDLVAGALAELGVRRGLVVYGLDGVDELSVTCENEVVYVDDGEVTDRDTVAPEDVGLDRADPKDVAGADPETSAEEARKILGGELPVDHPKVQMTAFNAGAALYVGEAVDSLEKGIQRALDVLEEGRALEVLEKVVDLSS

SEQ ID NO: 679 - protein, 1257 aa, Methanopyrus kandleri
LGRKEKMAEKCRKLMTEPGKIRNIGIIAHIDHGKCVAPETKICLADGRFVRADELFEELKERGRLVKCDESEEVYELREPVGVSSLDKDAVEIVEGKITHVWRLKADKLVEVEVKNGRSIRTTPEHKFLVLDPSGEIVEKRADELEIGDYIVCTQKLVHEGMSEEELKREVFRRLGRDFFVHLPEEEAESVLELAKERGIKALWETLEVDIEENSFYYQLRKGRIRADILVDLAEELGLDLADLYDAVEVSYRSNTKSTKPIRLPEPEDLFYLAGLMFGDGCWNQLTNGSEAIQGEVKRIASDMGLEVRVRRYEGKTARIDFPETVPRILEALFDYPRRKKAHRIRVNDFLTRAPLDCIAEFIRGYFDADGTVEEGRSAVSVTSVSREFLEDLQLLLQKFDVASYLREGDGAYTLYVSGARSLERFPGFREPEKAEKLKKLMEKASSSELEKVPISGEILREVRGDVPTTRMFNCYSNYEGGQVGLTKSSLEKVISTLEAVGVEGEALERLKALARDDVCFLEVVRVEEVEYDGYVYDFTVEEHHNFAAEGFVVHNTTLSDQLLAGAGMISEELAGDQLVLDFDEMEQERGITIDAANVSMVHEYEGEEYLINLIDTPGHVDFSGDVTRAMRAVDGAIVVVCAVEGVMPQTETVLRQALRERVRPVLYINKVDRLINELKLSPEEMQNRFLEIISEVNKMIEQMAPEEFKDEWKVSVEDGSVAFGSAYYGWGISFPFMEKTGITFKDIIEYCQQDKQKELAQEAPVYQVVLDMVVKHLPDPVTAQEYRIEQIWPGDPESEDGKTLRKCDPNGKLAMVVTDVRIDEHAGEVATGRVYSGTIREGQQVYLASSKKETRVQQVGIYMGPDRIRTDEVPAGNIAAVTGLRDVWAGETVTDPEDPIEPFEELQHFAEPVVTVAVEAKNTQDLPKLIEILHQIAKEDPTVKVEINEETGQHLVSGMGELHLEIIAHRIKERGVDIKVSEPIVVYREGVFGVCDDEVEGKSPNKHNKFYVTVEPVEEEIVEAIEEGKFNPEEMSKKELEETLMEYGMDRDDAKAVETVKGTNFFLDKTVGLQYLNEVMELLIEGFEEAMEEGPLAKEPCRGVKVSLVDAEIHEDPVHRGPAQVIPAIKRAIYGGMLLADTHLLEPMQYIYVTVPQDYMGAVTKEIQGRRGTIEEIQQEGDTVIIKGKAPVAEMFGFANDIRSATEGRAIWTTEHAGYERVPEELEEQIIREIRERKGLKPEPPKPEDYIEDYGG

SEQ ID NO: 680 - protein, 197 aa, Methanopyrus kandleri
LEGNPYLDRLYEMKVFGKWDPTEVEVRDPGLKDYICLKPMYLPHTGGRHAKKRFAKAEVPIVERLINRVMRTEKNTGKKHLAYNIVKRAFDIIHERTGENPIQVLVQALENAAPREETTTIIYGGISYHEAVDSSPQRRLDIALRLITEGAQQRAFRNPKPIEECLAEEIIAAARYDTECHSIRRKEEIERIAEAAR

SEQ ID NO: 681 - protein, 147 aa, Methanopyrus kandleri
MPGKKSPAGEFAARKLREKRKKFRWKDERYKRRMLKLDEKADPLEGAPQARGIVLEKVGVEAKQPNSAIRKCVRVQLIKNGKQVTAFCPGDGAIDYIDEHDEVVIEGIGGPKGRAKGDIPGVRYKVVKVNDVALSELLKGKIEKPMR

SEQ ID NO: 682 - protein, 142 aa, Methanopyrus kandleri
LAVKLETEQIRMIALFESLTGAHVLDCVIDDEHNRAIFVVKEGQIGLAIGKKGQNVRRVQEQLGMDVEVVEHSEDPEKFIRNALFPARVKSVRVTERGNKKVAIVDVPESERGRVIGKGGRNIKKARILARRHHGIDDIIVT

SEQ ID NO: 683 - protein, 109 aa, Methanopyrus kandleri
LQEIERQIRMAVETGDVVLGSNQTIKLLKLGKPKLVIVAANCPAEIREDIEYYAELADVPVFVYPGTSMDLGDVCGRPHVVASMAVLDDGESDLIATVRKAMEEGAAPS

SEQ ID NO: 684 - protein, 429 aa, Methanopyrus kandleri
MNVEELLEEVCKEEDVELPDSVHREIVEKVSEDEELKDADEETVRKVLRALVRNYKCRQIERGDAVGVLAAQSMCEPATQMTMRTFHLAGVAEIDITTGMPALERVLSLPYHGPPTWVIELRLKEPYRSDREKAEGVARKIEETRFEELTEYIEVNPDECAIEIGLDEERIEEHGIDEDQLVAFVREHTGGACHLEGDVLKVTLADVESASELAEIANDLREAVVKGIEGVLHASVQYDEDEEEYYILVRGSPEGAPGRPPRWISQRARNSKVAKRAYLMLQLMQLDEVDATRVNTNDPKIVDVLLGVEAGRNAIIEQLEEVYESQGISVDPRHFMLISDMMSFWGELRSVRSVGGYSVMELKGSPLTKAAFEYVSRVLTETATSGDVEELRGVLENIIVGKPVPVGTGTVELTVDYSKFKEGEEEGES

SEQ ID NO: 685 - protein, 953 aa, Methanopyrus kandleri
MTLMEEPRVQDPPKYVKRILFGILPPDKIRKMSKVEVTSPETYDEDGYPIEGGVMDTRMGVIDPGLRCRTCGQPAGRCPGHFGHIELARPVLHPRYAERIKDVLRATCPECGRVKLPEDEIESYLREVREGIRPVKSVAAEVIDRAEKRESCPHCGAESRKITYQKPTTIMMDDERLWPVDIRAWLEKIPDEDVEILGFHPERARPEWAVLTVLPVPPVTMRPSIILETGERAEDDLTHKLVDIVRVNLRLKESLEAGAPEPIIEDQWDLLQYHVTTYIDNEIGGVPVARHRTGGKPLKGIVQRLKGKEGRFRQNLAGKRVNFSARSVITPDPELDPFTLGVPEAIAKELTVPERVTEWNIDRLRKLVLNGPNKHPGANYVVKRDGSRIRITDENKEKLAEDLEPGDVVERHLMDGDPVMFNRQPTLHIQSELGFRVRVMPGKTFRLPAACYMGVGFNADFDGDEMNLHVPQSEEARAEVRELMGCYVYHLWPPKNGHEDVRNSPIHEAIVGIHLLSRAWIPLREAYQLLEEVKKEGDWFEPTEVKLKPEAKYRRGFEEEIHELEFVCGQPREGEPLVTGRQLLSVFLPDWLDRVELENAVCPDDEEHGKVVIEKGRIVRGFLDEKTVHGIMTEIVHRYAAREVARGESYPWFKAAETTLRAMDKIGRLGLRFVTRYGFTLGIDEFEDIYERFRDEVERLCDEAAKKAKEIIERGERRLQELEEHETCNRSRIERGEMLERNIESEVMAILNQPRVETERLLKKHRDLFNPAYIMPESGARGSITNIARMALIGGQQAVMGERPHRAKHNTEHIMEKIVNYSYTDRVTPHFEKSLIPGVKEGGFVRSGFFEGLDMVEYFLHAMSGREGLIDKGFRTADSGYLHRRYVTTALDLIVDSGGRVRDSANNVIQLTYGEDGVDPAKKWGLNLDVEKALKVVKEVVLEEERRVRGGAG

SEQ ID NO: 686 - protein, 640 aa, Methanopyrus kandleri
VETRVDKAVEHVLKGPEREEDRTPVYLNGRLIGYVEDPEEFVEKVRELRREGVLHPRVNAAYHEDLNEVHVNCDRGRVVRPLLVVEDGEVKLTEEHLEKLREGEISWKDLEEEGVIEFLDAEEEENALIAQSLEEFYSMPKEERKKYTHVELDPAAIFGTCCSCIPWPESNSAPRNTMGTNMTRQALGFYAANHPIRMESRGHLLYYPHRPLVKTRGTEAFDYDERPAGQNMIVAVLTYEGYNMEDAIIMNESAIERGLARSFFFKTFEDEARTYPGGMKDKFCIPEKEVRGYRSEDAYKHLGEDGLAEVGERVEGRDVIIGKTSPPRFLEEFRPEELPAEERRESSTAIRHTDSGIVDSVIITETSDGHKLVKVRIRDERVPELGDKFSSRHGQKGVIGMIVPEEDMPFTEDGITPDLILNPHALPSRETMAHILETLAGKAAALSGKRIDGSAFTSNPKEAYEEIKKMLRELGFEPTGKEVMYDGRTGQKLEAEVFIGVCLYRKLYHMVKDKYHARSRGPVQVLTRQPTEGRAREGGLRFGEMERDDLVAWGASLFLKERLLDESDKYEAYICPNCGELCYVHAATGKTICPICGEVRADRVEMSYAFKILLDELKSFCMDAVLEVGSLSEREEGEEE

SEQ ID NO: 687 - protein, 525 aa, Methanopyrus kandleri
LSEEDYLALLEGYLRRNEELLGDVKTHPLIAHHFLSYHWLIDEGLQQLIEQMEPIEPEVEGASYRIEFERIEVGEPSSIEPDGARRKIYPMEARLRNMLYSAPLYAEIVMYEDGEEVERDNVYVGELPVMVRSKVCNTYGLSEEELIEVGEDPKDPGGYFIINGSERVLMSLEDIAPNRRVNEKIRERGVLDEVRSRVYSRGERYRGPVDVIDRKGRLVIDMPAVYRKFPVVILLRALGLTEEEIMEGVGPEFATIMAEQMRVLVKEEIGSQEDALEYIGRLSRPDESREERIKRGKEVLAKYFLPHIAEVDDLDDDEKLKEVFRKKADEVLKMVREVLELKYRRVKVKSVRDRDHYANKRIKLAGDLLYEAYEYAFQQLAREMRYQFERAYSRGREPTIRYIVRPDKVTDHIRSCMSTGTWRTGHYRPRTGVSQILERYTWMSTMSHLRRIRAATELGVGKWSIPKEARYLHPTHMGRLCPNETPEGANCGAIKNLALYAEVVHKDADEDEVIEILEEIGLETE

SEQ ID NO: 688 - protein, 92 aa, Methanopyrus kandleri
MAERLDPDVVLNHVLVPKHEVIDDEEEIEKILEELGVEKDDLPRIHTNDPVVVALSEKLGKRIKPGSLVKIVRDSPTAGKTVVYRVVTNPPE

SEQ ID NO: 689 - protein, 180 aa, Methanopyrus kandleri
LYRDFREFRPDLEFRACVACGECAAVCPAGSLELRKGPVEAFCATCRLCEDVEVSRLPSDVASLLCPIAFVQRIAERLLPHPWIRESRCTGCGLCVERCPVEALRLEEGRAVVEGDCELCGTCWDICPVVDCIIPPAAAVREVFLGFSEASCVDCGLCVETCPFGWGEGAWRSGWIRTWC

SEQ ID NO: 690 - protein, 876 aa, Methanopyrus kandleri
MIERVKIENLRSHSSTEIEFREGINVLVGPNGAGKTTVLEAITLALFPRTFRSYDHMIREGERRAVVEVVFWGADGHKYKVRREFYRGGGQRNPRLYREEGDGWKVVASGRAEDVDREVMNALGGVDRDVFREAVYIRQGEIAKLVEATREERKRIVDRTLGLAEFKKAREQAHELLRVAEAKLETFRERVRDLKGSKKELKRVERELEELKREVKELEPEVEELKERLNELREAKREFERLEGELRLLENKIESLKGRRDDLRKLVEEGKEAERELQRLGDVPSKVRELENEEAELRRRIEELRNLLDDLRSLRNRLESAEEELEGVKRELEELKDEAGVDPERLVEFKDKIVEASERLRDLRREEELKRKLEKVSDELSELGDREETLQSEYEELQERLDEIQGELKEIRVKEKELLERIESLREAEGECPVCLRKLPRERAEKLLRDAEKELERLQGREEDLRKERRELKDRLESVRRELEGTKERMWRLRERREELERELEEIEELKEELADLSRELGVEEDRLPELRDLAVRAESLLRDLERRRGDVLRLEKELERTLDRCEKVIGRTPSGVEDVEEELRRLEEERDHVGQKLREAEGELERYHNLEEKVKRAREARKELKRIERDLEDAKGRLEQVERNLEGLRERYGSEDRLEEELESVEKKYERVRDKLSEVKGRLNGMEKRREELKKQVRKYREAKERKERLERVVEVLSLCKEVFRYSRDVAREKVLPAVEREASKILQDLSDRYGSLRIEDDGAVIRVSVPGGHFIEADRMSGGEKIIIGLALRLALAMVGSSFAPFIMLDEPTVHLDAEHRERLAQALRELDLGKGRVRQAIVVTHDEELEDAADELWRIENRAGESRVERYSG

SEQ ID NO: 691 - protein, 451 aa, Methanopyrus kandleri
LRMAHVADVHLGHALMNLRSREEAVMETFERLMEEVRECSVDVLVIAGDLFEHARPKTEALYLAVEKLSELKEDGVEIVATAGNHEIRRRKGAVSPISVLERMGLVRHLYYSERRPERHRYTATFDGVRVTFHGLQYLPKNSFVERAKVIRAKYRPDPEADVNVAIFHQALPGTIPDESEIVEPAYFPEGHDYYAMGHVHVPSREEKIHGSPAPYPGSPEPLTFLEVKDERGAHKRRGFFLVEFDRGGLVEYEFVEVEWSRELSVVEVSGERWEEELRRRVRRGQIVKVVAKDTGASPEEVEKVAIEAGADRCVVELRERRREVEEGDETEGPLDLEGIIREGVKRARAATLTRVDVPDDVVVEVALEILRGVREDNPPDLGDVEGIVAGEPPSEGSEESSEEPEESDGEEVGLEVEEVKVESRGTSSEGMSRAGSKLGSSGRPSLDRWIG

SEQ ID NO: 692 - protein, 527 aa, Methanopyrus kandleri
VRRVERKVVGYVYESPSVREFTFVVSRDAEDVGVGDYVVVREPDSDGRELLGRVEDVRRDVHEGIKGEIAKASMVSGRPVPELDWTVVARVEVLGALEDGRLRDPRMPARPTDAVYRLPESELEELFSKGEVFLGRLKDSRARVFLGLNELITLHCAVLGMTGSGKSYTVGVLIEEMARHDIPVVVIDPHGEYTSLREPSHDRERLERWGLEPEGLDDVEVFAPPHSEGVKDYPITIDTTKLEVDDFEVLAPELSKRKAAPQVLEEVVKELQRRYRETGEKYSLEDVVEELDAQAKRARASGDVVQYQAARAVLRDLRPLLRYGIFDMAESPDLRRHVRPGRVLVLNLRGVPDRAQQIVVTHFLRRLFELRQRDEIPPVFVVLEEAHNFAPAGEERSSSKTALSVVRDFAREGRKFLAGLCVVSQRPGRVDTTVLSQCNTMIVLRTANPDDLENIRKSGEGITREALERIKGLPTGTAFVTGSAIRIPAFVDVRPRMTRHGGETPDVREIVERWKEDDAEEDLDLGI

SEQ ID NO: 693 - protein, 389 aa, Methanopyrus kandleri
LSGELDRFLERGRVRRGRDYGRLLEDISRRRRELAEDVINVYRRVSPGRNPVLRRVLEVVAERKREVEPEHPDPEVTFGVDGGEGMREYQGVVLYVTRAAAWSEADVLSSWDFGVLSRTRTPQMRVAARRVKLESDVATRAVERGGEVVMLDGPIVPHHDLKGANEDSPNRRDYWGRILDARRTMLEVCEEEGAVVMGIVEDCKAKHLLRDVRDELGEDLPLKALPNDPVALSRELDGGPVLEVGERTHAFELPDEDYPVVREFEEATGYSIFTFYVRTTRYSPPVRVEIPEFVDPDEAAGIVLGTSIEYGGYGIPLPLVMADEFAKVGRSLVDWIEEEVLTELASDGRFDVIFTVFRRLRRESRPKRRSSAEAEREIHLRHGGEEGGA

SEQ ID NO: 694 - protein, 156 aa, Methanopyrus kandleri
MGARTFGQVSVEFVLLSIIVLTAAFIAGRYMGPEYEWYCVKKAVSDAVAKTREQVAVGVTYRVGDQEVEISGNLSVVRCQVNDDRIEYELKYSGDNPAGVVDLLRRNVLLQVYVALYGRPKSVSEISNPVKGSWANYQVEVSGGESIKVVVERTKE

SEQ ID NO: 695 - protein, 191 aa, Methanopyrus kandleri
LRVRSWFSATPSGQVTIEFAALLLIMLVLSAYFTYSVVGTFLGVSDVMALIEARYIANYVANAIAGTISWLPDWQSTANQIHLPEKIGNSEYYLKVRVKGEPGGPGEIVVILRLGGRFEKKVGVTASVPILVGWPSGGWPPRTPGVVLIDPRTVDDPVPTPVTEWPPGDEWWVSTSGKPFEFGLYVIPPGG

SEQ ID NO: 696 - protein, 149 aa, Methanopyrus kandleri
LFMSFSRGQASLEYLLVLLIGVTAVGMAMAFVKEGMYGSGGVEEAASALEAKAMAEQLARVLDKAAACDVGTRFTVRIKGRPGTQGSYTVSVEPTGQHDEYYVIVEGNGVKGVAKFYSFGKDVVVENVTVPGVVEVSVVEGPKLVLRNA

SEQ ID NO: 697 - protein, 861 aa, Methanopyrus kandleri
VGLYHKLPLLKERGQVFTLDAMAALLLSLVLVSLALDYIHMVSWPTISPRQEVSSIAVVQPVKWGWVATGVYRGELPHLEVKEIRVTDWNVNGNKWTAKVDVSDKLPPDKKIVMAFLVLMVGDNHVVDAYDPNDKDLGVYVEVNGDENGERVFPTVPIDWRGNIGWWFPYNYNGRIWEKTLVDLTVDDRGNPLLVNKTSDDNIRVRIGVKIRGYWGRQYRDKTRIVLVLAPKQFDVAVQVWRPDGPQIGPQPYDDRDGKTGIPVKGSLATDLSRNKNPDPVTNFADWYGEDVDKDRLENPDENPVITVKDLVMRIGRVFGNWRPWTPVGTGPYREYYDKSDGTVHKLEDAKDPNGDGADGIVLTRHGAQIDDSYHLFAAYVMMPRTFSSVCPLDAPILALTTQRNGPPEFVVYANVRTPQDIAKIDWANVDESLGASNIGTNTTYRWNKTEDLDFYNDELKYYKYYDDWYSRSIGIPADYLYGASGYSHLVVIDPEAQWPITPAGGLIGTSSTVEQVLRTHSVLYAYLRLPNRSHGVHTHFNYDTTHGYYWYFKFPGGIPVQGGPQPRIVAIWIKAPHWLYQWAPWADSVSASLGFANTRFNNVPGDGRSDELDMTINIQRPPDMPSVIKNWAVQDVYMFGNLDEDPDNFWIYIDDEEVWPDDWVPPSIEDLKSLSGGKIATPGTHTIRVREYEQPSPEAVEIGPFNVLVLYKGTMYLYLPRLKRSKEDAVNALRQEFERLGIDPDDPRVRITVAPSRGYDKPHKFRLVAWQEERVLYTPEYLRRLSTEALSQLQSSGALSYVAMEWEYYQDTGDATKLRRALQSLQPLLSSVLGVHFKLEVWDEKNKQWVTLLTDQGPAI

SEQ ID NO: 698 - protein, 565 aa, Methanopyrus kandleri
MIPRGERGFLFTPAVALALALLLLSVSYLSYRGRESGYLIRCEYIKPVINEAILSMTHQQLSRAVYLGVVDFLNGTELPGGEKNGYRYGRIAVHAGGTNIEWVASPTGLLAPYDIVDVGRLKGDYDSYRTVIESLRYYIDYELAKLAVDVHDSIKQTQGAEVWIVPRCYVGDGSLYWDTSDPEHPKVRLSWYGRSDPKDVSRTPIVPDAHDPFTIYVHLDIYLIAQVPGWEQFNLHLGQTTVQASIQGYAPSGNENKAVFDPLPIWAYYVSKDRWGDGPLRFKPMIVMGNYQVAVGQGGSIGGERVGQSDVIRFYSAYLNEVNGDGRNSEADEDKLRLAHVLSIPGKMLPWDDTKLLNENEVDGETESQWVILPYFPTRENVLGDDVGRPPNFIERAAGILYVLPSNRVVSVDGIEDPDVDVIQRCEAGMETLIPALPAEEVDVWAHGPFGTVDWMAWMEVLASRSGKLRGVINGVRASEFGPPERYDDRGEPVRLFRLYGFNSNDPVVRQINSLLAGIGLQLATDADRRKGFALPGADILKWFLLPGTNTDMVLKNGRVIRVWP

SEQ ID NO: 699 - protein, 304 aa, Methanopyrus kandleri
LRGQITVDALAAGLISAIILLLVTDVARVVTAHGITSLRTYELYASVDRFAASLTSPSWVGANLTSYDIVWLWSEPLQWTWGGAPLRTGVRMYLAVDAYKWTRYSEGGSLDSPIKVNDGRMMADLVFPNDDLNVSGEAVVKSYDVMLVKRGDTWVYDENLPQVWGNTVSYSGNVPGVKVVWVTVSGDGLYGWVRWLHKRYNQLIQSGLSEEEAYKELAREAISMNSGGNRIVFYSSSGWATDDPVELVRRIVAEGEGSGLSLTIIAIGGRPFTVTLSGSENEIFWNQWTAGLFPVKLRVGVTAG

SEQ ID NO: 700 - protein, 56 aa, Methanopyrus kandleri
VSVEWTILLMTVIAAVFALGIALNASNSGFVSTTGSGWAAGMKELGSEVVRRAATP

SEQ ID NO: 701 - protein, 62 aa, Methanopyrus kandleri
VSGQANIELLVLGVLVAAVAIMAAVIGYYMPLKKSSSGLGDVARAQNEKISNVCHELATKWM

SEQ ID NO: 702 - protein, 64 aa, Methanopyrus kandleri
MALGVRGQGGVEYLLIIAIVAGCAIAVGVIAYYLPISGGKQGLKDVGSAVSGGFERFASSAKKL

SEQ ID NO: 703 - protein, 324 aa, Methanopyrus kandleri
MDVGFLAGLAVATVAAITDLKWGIVPNRLTYPAIVAGAIYAAVIDPSHLGYALLDAGVAFGVTLVLNVLGVLGGGDVKLLPSLTLFLHRGDRITTGIDVLFNSILLYAPFALLYLTVSTALDRGRPFLKELCLNTTILVLASLIAGGVATILGTVISSVVGILLILAVWKVARSYESKLKIVLPALVVPAVLLNLRASPIAVLWEVGIAVALSTAFTTYRWAGKERNVEELREGEIPLEIVVRTEEGTERVGRLKGALLVATGRAEPVVVPSGDGFTEEELEKLKRLGIDRIRVGHTTPFAPAIAAGYVVTYMLQGSPLSWLWG

SEQ ID NO: 704 - protein, 332 aa, Methanopyrus kandleri
VKLVITVDLFGERGHHRLGALPRDAHLTVFTDYLSILEMRDALEAVDWDIHCTTYSDVPLTYVPEEDAQAHIELSSEFGECFRAPALAVNKALLRKLPELGFDADSSGWSRKGRVGRLYEVTEAPIVCDVMDRKFLNKVLSRLDSYDVVVLRSGSEIPGNRHFKIVDKIASSLSVAPLSEVLEEADGRVRAKFNDRGILTEREHLLLTALSEVWRLHSELSEEVGDRELILAHLASESFRNPQRVLTVCKRFAEELGSEYTERLARVSKRPIVIGALRKLSRRFQIEMEEEDERLRVQELKRRVEAIDRGIRMLAQDRPIEGWNEILSVLSG

SEQ ID NO: 705 - protein, 325 aa, Methanopyrus kandleri
MLRNIGPVIRLIVLILYPLALPLARILVIRMSPEYLRRMDYLLQVSNIDVPYEIYLSASLIYVLIGMSISGPLIPKLGSTAFLLAVMPLYLLIHPRIVQSLRIKDIEENLPDALRQMVEELRAGLSIFETIRNVAESDYGELSREFRIVVRDMDTGKTFEEAILDMAERVNSELLTRAVRLTVRISMSGGALADVLEAVENDIREVRRIELERKAITTMPCLALALGGLISGLPVGVSIGAVIGVAMMERMGPTYAMLPMYLQAKDPLASYPLVLGLLSGMAIGIIRYGNMKRGLVFGLPLGAAAAGVYLAIVSVMPSFLAAGGM

SEQ ID NO: 706 - protein, 362 aa, Methanopyrus kandleri
LSLPSFSGLAEKLRESTSRMLGGRLESSLTAKVRAARHAVRGEQGEDVEKIKRIVLGIEEEGERDRTAEEINERLRRLCRERANVLETLIEMVQSLSPTLGNRFRGLAPDREVLQKAGLRISPAAFATFMIISGLMGVVLTSVPAALFPLPLPLKVLGPIMSFLLGMVVPRMMVTILIRRREGEIARQLPYAIRQMATEVSAGLSLIESMKSISESDYGALSEEFERVIREINSGTPINVALQRMANRWNVDGLRTMVRFITQAMESGANIAKTLMTLADEIAHELRQRYREYGHKLQALAFPYIMLTLVIPTLVTVAMLLAANLSGAFLVPPPLFGPMIAGMVGVMAGIFLFIFKSAEPKV

SEQ ID NO: 707 - protein, 602 aa, Methanopyrus kandleri
VVWTVPRKRNIKDLIGGLEEDDLLRDILGEKEEESKSESPETVEETAEASGEHYEAEESKISPLSSEKAAEVLEAHELAEREGWEGKILCDDNIRRIVEYPDQPVPVYISKEYEQYYNFERIRTQVLKRLGSQAPPYARDDEEFRKVLDEIKDILSMNIDFDPTEYATLKEREKAFVELVKENFDAVLEEYPELEVVKDDLAHLLMYEMVGYKEIHPLLKDDNLEEIMVVPEVVLGGTAKHCFIYVYDRDHGMCLCNFRVTSRSIRTVIERISRESGRRIDQENPLLDAHLPDGSRVNATIPPVSPDGPTLTIRKFREDPLTITDIIKFGTMSYEAAAYLWLAVEYGANILIAGGTGSGKTTTLNCLCIFIPPEERVITIEDTLELQLPHEHWVRLTTKPPNVEGRGEITMDDLVKNTLRQRPDRIIVGEVRGPEARTLFTAMNTGHDGCMGTLHANTARETITRLTNEPMNVPKIMIPALDIIVMQNRFLQRGSGSIRRITEISEIAGMEGDTVQLNTVFEWKPETDEVTSTEVPSMVFKKIQEKTGMSMDEILHEIEIRKRILKYLVDNNIRHVREVGEFIHEFYKNRESVLEKVGISGY

SEQ ID NO: 708 - protein, 585 aa, Methanopyrus kandleri
LAEDLPPEILKAVEEYYNRPEIVEVVESLAKPKSIEDLGLPEEYIENLVLKVIADRGPVEGREIYEVTRIPIPILEEIVDELQDRKLVGHTGGGPMFQNTTFDVTPKGRELAANIMSEDPYIGVCPVPYDMYQEVVGDQVEGRYPIEIPEEVYEYAFHDVIGAEEAKRTYYLAATSGRGLVVFGPPGTGKTFTLSRMAKLLPPIVIPKAVYVAGSVLQLYDPDFHEPRPRREQPGDERWVKIHAPFVFTGAELTLDDLQGRYDAEKGVYEVPPHVKAHGGVFLVDDVGRQRDSHIAILNRLIVPMENKKDIVHVGGTAVEVFCDFIAAFSTNLPITVFDEAHLRRAPLFVHLSHPPLEEAVNLFRKRLDEMGEEYTEDALETYRRAFTPEEEGGWGLKPTFAYARDIAQLAQAIRIQEGKDVIDGEIVEKALRKHIVLTLQRKGADLDKFGTEETEVPVTTIVVKGVTEEDVNEIEKIPGVRTVSPMGTDVYVDLEGTTPTRFISLLREWGIEFTDVEVVGTFRASVLAEATTMEELMEGAEEEETTEGVGVEPETGKEERETEIIEEETEDIEDVDDLLKDLEL

SEQ ID NO: 709 - protein, 199 aa, Methanopyrus kandleri
LRAPYSGRGKPSREELGMIIARIRGREYRFLTAPGVFSWRRIDPGTQLLAENMDLEGVHSVLDLGCGYGVLGIVAAKELGEGHVVMTDVNRRAIWLANENRRLNDVEDITEVREGSLYDPVEDEEFDRIVSNPPIREGLDLVLRIVREAPNHLTEDGELWLVVRRKMGSKRILSEMRTVFGSAEVAARGGGYWVLRAPG

SEQ ID NO: 710 - protein, 431 aa, Methanopyrus kandleri
VLKDAYTADVTPERDGEEVRLAGWVHEVRDLGGIKFVLLRDRTGIVQLTLPKQKVPKETFEKVPKLTKESVIRVEGTVQANEKAPGGVEVIPQRIEVLSESDTHLPLDPTGKVDADLDTRLDARVLDLRREEPQAIFKIRNVVTTAIREFLEERGFIEVHTPKIIASATEGGTELFPVVYFERDAYLAQSPQLYKQMLMAAGFERVYEIGPIFRAEEHNTRRHLNEAISVDIEMSFIESEEDVMRVLEELLAHVFRKVREECEKELEALDRELPELETPFERITYEETLDLLSEHGIEVEWGEDLPTEAERKLGEIFEEPFFITEWPRETRPFYTMAKDDEVTTAFDLMYQGLELASGAQREHRYDVLVRQIEEQGLSPEDFRHYLEAFKYGMPPHGGWGLGLERTLMTITGAENIREVTLFPRDRKRLHP

SEQ ID NO: 711 - protein, 431 aa, Methanopyrus kandleri
MRLLVRPEEEELERVLRRSEMDVTEVLPDVERIFEDVVERGDEALLEYTERFDGVKLEAEDLRVSEDDFEVARELVDERTVEALEEAAHRIEEFHRKTLPRVDRITFDVEGTECGLTLRPIPRVGCYVPGGRAAYPSTALMTVIPARVAGCREVVVCTPPADNDVRASPEVLVAVEIAGADAVYRVGGAQAIAALAAGTETVLRVDKIVGPGNVYVTAAKLLAYSRGLTDVDMPAGPSEVFVIADDSANPDWLARDLIAQAEHDPHAAAVLATDSEEIARAVKERVEELLDAGIEREEIVLKALDRNGWIVVLDSLEECVRLANRYAPEHLQLCVENPEELLQDVENAGAVFVGHLTAVPFGDYATGPNHVLPTGGFARARGALGTWDFVKIIPIQRLREGDVERLAPIVEELAEREGLPNHAEAVRARRS

SEQ ID NO: 712 - protein, 254 aa, Methanopyrus kandleri
VKIPPDHPRAEALKIRERLVRGFEDGYVVPQGLIAQGRGEVFDYLIGEKTIPPAREAIKAAAAAFKLAEHPVISVNGNTAALCPEDLVELSEVTGAPLEVNLFHRTEDRVEKIAETLREAGADRVLGADPEHLVRLPNLSSHRAVVDDRGIYRADVVLVPLEDGDRTRALKELGKTVVAIDLNPLSRTARDADITIVDNVVRCVRKITREYERMDPDRAKGVLREYDNGRVLARVLDHIRERLRVLADEAAGAT

SEQ ID NO: 713 - protein, 376 aa, Methanopyrus kandleri
LVNVVVCVTGSVAAYRAPDVCRELVRRGHRVRVVASEEALRFVGKDALGFAAEEVIFRLTSRAEHVELAEWADVVAVVPATLNTLAKIARGVADAPVPLTAVTSLGAGKRLVVAPAMSLHMYRSPPAREILRQLEDMGVTVVGPVIEEGKAKLASIEEIVEAVEGELSGFRVLVTGGPTMEPLDDVRVITNRSSGRTACEICRELRARGAEVVFVHGPLRVDPPPMDERVEVETTREMLEEVVKRIDDVDAIVMAAAPSDFRPAERADGKLDSRREHEIRLIPTEKIVREVFPDFDGVRVAFKLDPEPVEGARRLLDEVPCELVVANPPETAGAEGSEWWILDGDGEVIERVKGDKRELARKLVDALSKLLRGDRG

SEQ ID NO: 714 - protein, 180 aa, Methanopyrus kandleri
LILGGLKLELPICEVCAKTGLLCPGCEERLEQGEITETDVEVSKKLVELKEDHPSLEDVALLRTIDTGNLVVLVTKQGMAGKLIGKRGRISRALSDHLGKKVRVVEEVEDPKDVRQLRKLIQDLILPARLLSVNVVYEPDGERYKAVIHHRDRHRVPADTEELEKAVKELTGMEVEVTFG

SEQ ID NO: 715 - protein, 93 aa, Methanopyrus kandleri
MAEEENVVYVGSKPVMNYVLACITQFNEGANEVRIKARGRAISRAVDVAEIVRNRFMPEVEVKDIKIGTEELETEEGDTVNVSTIEIVLEKPV

SEQ ID NO: 716 - protein, 815 aa, Methanopyrus kandleri
LDFQPLELELERGHSLTTRPYGFPETSFGGTRTVHHLVPAVLIMFFAVTAPVASLEPPSDPYEQWREELRTMFSDYFPHFDTSTPGDVKLTGAKVCCACEVTTRQHVEVQPGVEAEGVLVATSTKSGADIWFVNWNGWARKLKSVQGETPTDAAYAPSNDGGIVLFVSPSSDGVLLHAFRLSFVTYLNLPGSEALYVPELEADNKYAIRAPGKVGRIRVLHVGYEYSGNVERPLFLVLYTVSVQGKPVEEYGADLYSALVRVDPSNLSLEVVPGSVISDFQYVTTFDADVVKVPGYCEYRLKDRRILANWVAVAYAKQWKECGVYLTLLGYSPVDDTYLPIAHTRLSDEACSLPIGDLLLAHTTLSDGTVVFLTAWTDGRDPISYLKDLLNPSPTDEVIFDGDVIWCQPAVLEICANPRILASIRNKPAAIVPKGSKPVSLIGIKGLEDSAMFWLDVVESDGIRSFPIPVAVEREGDTVYATPCVLAVAVRTTEEKESEGKSGEELLWVLGTSDTRARDPKFVPNVVLPTDEFNDIRLWEPWASTLTITAEGVKSVVVIPTGKTMTPPGVPTGEGYVIGKMVVMIYQTEQGTEQRVFALPSVPIACLRSLTLIGGYLPVIPLRYRMLKIAVNISGPTITSSEEVHYRVQLSNLPTIREGLSVVIVVSRRNQVVGAALVKLSEPDHPVVEGDLEGVEVKSGDISPVIDVWVKTGGSGFYTVEVFFADALGWLMGEEAVTTTTVRRVRTPSQAPSSGPTEYIPPGLGVATPSRESESHPGVALPVPVPVRVRIRRTERRMTGLKSPITRASRARSRS

SEQ ID NO: 717 - protein, 760 aa, Methanopyrus kandleri
MSPFELEFEGLKVQIGSIEGFEPRGEGPLPCPTVSDLADWDRKLFARYRVIAFPICDMCCMCTYGRCNLAEGRRGACGIDIRSNTARFTALKTCIGAACHAAHARHLVEYILEKLGDVEIDLGSEVDVMTPIFETLVGFKPKTVSDLEKGLEYIERELTKVLSSVHVGQEMDPHDYESKALHAGMIDNLALEIADVAQIAAFDMPKGEAPLVEFGPFAADDSKPCILLVGHNVAPGTEVLDYLEERGLDEEVEVLGICCTAWDVSRVDDRSKVIGPLSRQLHYVRMGIADVVVLDEQCIRADIVEEANEVGSRVIATRDLVMAGLPDVTDEPTEKIIEKMVSGEWMGVFIEDLEKAAEVAVEVAIRVHERRKKEIPQPDPKKLQKEAKRCLGCGDCERVCPNDLPIVEAMERAANGDFEGLADLFDRCVGCARCESECPTKLRVMNMIEDAWRLRTKEEKYKVRTGRGPIKDVEIRQVGGPIVMGDIPGVVAFVACPNYPDDVKQVGKMVEELLERNYIVLTSGCTAMALGMYTDEDGKTLYEKYEDRFDAGCLVNTGSCVSNAHILGACIKIAAIFAKKPLKGNFKEIADYILNRIGACGVLWGTMSQKALAISTGFTRWGIPIVYGPAGLKYQTLYIGDLDGDWTVYDARTGKECKEYCPIHLKYAAEDWREALVQAVKLCIRPNDTPQGRQTKLQNYIELYKEFYNELPPDLPLYVRDKNDVPITLRDEVMEYLEEVGWKPRKGITEPTLLEENVRG

SEQ ID NO: 718 - protein, 159 aa, Methanopyrus kandleri
LPLPRDPTLIYTDKAEVARAPVLKMVFRRANDSLMIVGPRAVEDEEWRELLMKLREEFRMSAVCTAPYKGNDLGRKMGIVEAATLLQRDAPVLGVHPDLVVFTGSRTDVTDRVLQGLRHARPDLVKVSLNPEYCPSADYSLPTVKRDQFLQELKALVGI

SEQ ID NO: 719 - protein, 632 aa, Methanopyrus kandleri
LGIEWEGVKVEIGELVVEGDSESEMEGPTRRELLPWDRTLASVYDLAVVPGDSEEERREVARTIVTLCCEGTAGLISTARLVVELLRQTGENLDPGFDAETPLPLYETLLGSSPECADDLEAGLSYAERELTSSVSELLRSHSLKGYESVAMHAGAIGLLAMEIADATPSTLMEVTESEEVFEIGTDDLPRRPTVLLVGHLPLLGHIITEELGTLARQVELVGLTHTAWPNREDHVRVVGPLSMYHEYLSSGFADVVVVDGACPGEDVIEAAREGGSKLVATVGARVADLLDVTDYPVEEAVEVLVTEEDAVYVEEPIKAVEIAAWAALRVEGSRDRREPPRRAFRVGPPTRLTDVVIRNVGVPVVAGNIPGIVVLVSCPEKSADVEEPAKIAEVLLERGYLVLVPGCLAVALGSYLDDDGKTLYERYPDTLLNTGPCTSAAHLVGACIRVGVIFGKLPIRGEFVRVADYVLNRVGACVIAWGGEYSEHLVSAAYGVTRWGIPVVLGPDPEAGSLLVEKNPKVIDACSGEEVEDPTPEHLRCVVSDWKEAAITAARLCMRPNDTPEGRQNKVESYVELYRELYGELPPDLDLLIRDESDIPVTLRSEIRELLEETGWTPRSRASDPTLLPEG

SEQ ID NO: 720 - protein, 467 aa, Methanopyrus kandleri
LTSLADLPVDVSPRHEGERIRSGDMYVELAGPKSFGAELFKVVDPDEIEPDKVEVIGPDIDEMEEGGRYPFAIYVKAAGEELEEDVEGVLERRIHEFCNYVEGFMHLNQRDQIWCRVSKNVTEKGFRLEHLGIALRELYKEEFGNVIDSVEVTIMTDEEKVEEFLEYARRVYKKRDERAKGLSEEDVNEFYVCLMCQSFAPTHVCVITPDRPSLCGSITWHDAKAAYKIDPEGPIFPIEKGECLDPEAGEYEGVNEAVKEHSQGTVERVYLHSCLEYPHTSCGCFQAVVFYIPEVDGFGIVDREYPGETPIGLPFSTMAGEASGGEQQPGFVGVSYGYMESDKFLQYDGGWERVVWMPKALKERMKHAIPDELYDKIATEEDATTVEELREFLEKVEHPVVERWAEEEEEEEEKAPEEEAPAEEPTMEVKELPIAPGGGLNVKIVLKNAKIYAEKVIIKRADREDKS

SEQ ID NO: 721 - protein, 257 aa, Methanopyrus kandleri
LIIAFTGKGGTGKTLLAALTVLELLDRHPDADLLVVDADPDANMPDVLGVEVDTTLGEVREHFKREIEGGELPPGFDKQAYMEYLVMTALQESDDYDLLVMGRSEGKGCYCAVNHWLRRVMRELLPNYDYVVMDCEAGLEHISRGIIEGVDTVLTVVDHSYKALRTAVRISRLIDELESDVGEMWVVANRVTEGEYAVIREKGEELGLRFAGFVRPDDEVVRLELHGRPLTELPPDAKVRRDMRAVLTRVGVLLSDG

SEQ ID NO: 722 - protein, 400 aa, Methanopyrus kandleri
MAEDKGVKNMLEHLVKNLLVEDVEEIELRNVTIELDELELDLKTVAQTLPVEIWERILKPEVEEKEREVEVPEYEPPVEEYEGCVAEVQIGATRSDGGSRDRVVVLGGERAYFPFEEPRPNPPVVTFDVFDTPDVGIPGPIREELGDVIEDPVDWARTVVKRYGVDIVTVHLVSTSPKLHDAPVEEAMETLEDILDAVKVPIIVGGSGDPEKDVEVFVKAAEVCEGERVMLSSINEDMDFERVVEAAKEHGHVVLTFAPVDVNLMKSLNKKVLNRGLSKEDVVMDPTTCALGYGIEYTIDVMTRIRLAALKGDEHLQMPISSGSTNAWAAREAWMKEESWGPREYRGPLWEAVTATTVALCGADLLMMFHPWAVQVVMEAMEYMAEGRVTGDAYVTDVIA

SEQ ID NO: 723 - protein, 462 aa, Methanopyrus kandleri
VAQLSAMDVYNLLPKANCGACGCKTCMEFATKLVNREAKPEDCPKLDDESLEKLQELLAPPVKELTIGEGDREVTVGGDEVMFRHELSFFNPPPVFVTVYDDMEEDEIAGKTEEIQEFQVERVGEVLKLDGVAVVSRTGDPEKYARAVEIAVERSEDLAVALITTDPKVMEAGLDVFDERPLLYPATEENVEDLAKLAADGDCPLGLHARDVEDLVPLVVEAQQYTDDLLLDPGTEFGPHDVVSTTDKLAEIRKAAIEEFESFGYPTLVTTFPYAFLEDDPVKAARRESYLASACVLRYADILIMDTVEPWALLPVLTQRQCVYTDPREPQEVEPGLYRIGDPDENSPVLVTTNFTLTYHCVAGDLESADIDCWLLVIDTGGLAVDVSVAGGQFTGEAVKEVIEETDIEDKVEHRVLVIPGKAAAVKGDVEDATGWDVMIGTQDSSELPEFLEKEGLLRIEE

SEQ ID NO: 724 - protein, 309 aa, Methanopyrus kandleri
LILVTGGAGFIGSHVVEELVDRGHDVVVLDNFSVGCEENLREVRDDIEIVRADVTDPRAVERTFREYRPEAVIHLAAQVNVRYSMESPFVDARINALGTLNLVSLAAEHDVERFVYASSGGAVYGEPEYLPVDEEHPTRPISNYGVSKLAGEYYVRVYAERDGFEYVILRYANVYGPRQDPRGEAGVIPIFLLRAARGEPLTIFGDGEQTRDFVFVEDVARVTAEAVERGDGVYNIGTGRETSVNDIVNAVKAVTGVDVEVVYEDPRPGEVRRIYLDPSRAREELGFEPRVDLEEGIERTWEWIRRKIA

SEQ ID NO: 725 - protein, 167 aa, Methanopyrus kandleri
LPDVFVLVVAPDRCTDCRKCVNACERTHGHARIYKISEDAPPVTCLQCDDAPCANVCPVNAIVEEGDSWIVTEDCVGCGLCAVACPFGAIEMVNGRADKCTLCVDAPKKVPACVEACDRGALKLVSKSQVAEEKRERFAIEMERIYRTLAKLESEEGSLRGESGSRG

SEQ ID NO: 726 - protein, 247 aa, Methanopyrus kandleri
VKVGVVGKGGVGKTTVAAALAKALTDVGYEVLAVDADPDPDLAYSLGLPESPTPIVERRELVRERTGAEPGTTYGPVFKVNPRVSDLPDELAVRVAPGLRLLVVGSVENPGEGCFCPAAALARRLIRYVIADRDESVVVDTDAGLEHFGRRVLESVDWVVVVCEPSVKSMKNARESVRLAREMGIERVALVKNKWREDAPEPDLDVDFELTVPYSDKLVELEMEGRPVWEDPVVRKAGEELARRLTR

SEQ ID NO: 727 - protein, 86 aa, Methanopyrus kandleri
MGGSGGEEGGRGAGKTSYEVVIREEHCKGCFLCSWVCPIDALKRSNRRNERGYLLPEWNGECTGCRQCELICPDLAIEVREVEGDG

SEQ ID NO: 728 - protein, 372 aa, Methanopyrus kandleri
MGKVDFLQGNEACAEGAIAAGCRFFAGYPITPSTEIAERMSARLPEVGGVYVQMEDEIASLAAVIGASWAGVKAMTATAGPGFSLMQEHMGYAVMAETPCVIVNVQRGGPSTGQPTKASQSDVMQARWGSHGDYEIVALSPSTVQEMYDLTIECFNWSERLRVPAVLLTDEVVGHMRERVVLRDDVETVERELPPEGEEIEKPFPMEPDDLVPPMPVFGRGHRVHVTGLTHDERGYPATDDPEVHRKLVMRLCNKVRKRAREIHEEVGYDFEERESDVALVAYGGCARTVIEAAEELGVTVFRPKVVHPFDPDMIRDLLDGYEVLVVEMNLGQYVEMVERALDRECVHLLGYPGGYPPTPERVIREVKKLSG

SEQ ID NO: 729 - protein, 271 aa, Methanopyrus kandleri
VTVVDWKELVRWDRMPHILCPGCGNGTILNALVRVLAEKFEEGELDPDKTVLVSGIGCSSRLPGYVKLDSLHTTHGRPLAFATGIKLANPDLEVIVITGDGDAAAIGGNHLIHAARRNLDVTVICANNYIYGMTGGQVSPTTPRGAKSTTTPYGNPEPPFDLCELVMGAGAPHVERWTTAHPAQLKAAIARALEREGFSFIDVLCQCPTNYGRRNDMRDPREMVEWLRENTSTREEEGKIRIGILRDEEREPFHKRMYDMIEEVRTGEEGD

SEQ ID NO: 730 - protein, 176 aa, Methanopyrus kandleri
VRKEIRISGFGGQGIVLAGVVLGRAAAVYEGYNAVQTQSYGPEARGGASRSDVIVSDEEVMYPYVRRPDFLVTMSQEAYEKYVGSVPEDGLVVYDSTLVEPSREDVEHVGVPATELAEEELGLRIVANMVILGALRELTGIVSFDSLRKAVEDSVPPGTEDVNVRALKLGAREVRE

SEQ ID NO: 731 - protein, 359 aa, Methanopyrus kandleri
MIRLLEYQAKHLLKEAGVPIPEGDVARTSADAARIAAELGGPVAVKAQVPVGARGKAGGILFADDPEGARKAARKLLGSRIRGETVRKVLVEEKLDIAEEWYVSITLDRAKRRPVLLVSREGGVDIEEVPDEKIARRYLDPILGLRPFEAREAILEAGIPKEHLRDVEEVITSMYEVFESYDAHLVEINPLVLTENGEVVAADAVVNLDEDAANIRHPEFAEETRDFPFVELDGDIGIIANGAGLTMATIDLVKDLGGKPANFLDVGGGAYPTLIRRAILTVAELDVKVILLNIFGGITRCDEVAEGIVQALDDVDVPLVVRLVGTNEEEGHRILREHGVDVYTELKEAVERAVELAGA

SEQ ID NO: 732 - protein, 287 aa, Methanopyrus kandleri
LLDSDTRVLVQGITGRHGSFHTKLMLEYGTEIVAGVTPGRGGQEVHGVPVYDTVEEAVEETDAEASVIFVPAPQAPDAVMEAIEAGLDPIVVITEHIPAHDTMRFVELARWEGIRIIGPNTPGIIVPPERVKLGIMPHQVFTEGEVAVASRSGTLTYEIVQAMTEAGLGQSLCVGLGGDQIVGTTFIDFLEYVREDDRTEAVVLIGEIGGNAEELAAEYIAETDFPKPVVAYIAGRHAPPGKRMGHAGAIIERGRGTAESKIEAFRKAGVDVAEKPWEVPELLREYL

SEQ ID NO: 733 - protein, 286 aa, Methanopyrus kandleri
LKLSVPGALTGFFHPQPGKTPKDTGSPGFGLAVDSVVIVRVRRLRAERLRVRADHPIDSRIARKCYEVLDPDGGLSVRYEFSVPPGCGLGTSAASALGTLAAGAAEIGLEVSPEWIARRAYEIELELGTGIGDVVTIWHGGAVLRVGPGYPDEVLIHRIPVEPDLRVLIYEPRPIETREALDGLSGTEVALRYLKELERHPDLELALRRSLEFAERLGFSEEVKLAKELSHKHLGASIAMLSRTVFAVSWEQDPQADVELPVSCSSFPEIISGISEIQCERGLRDV

SEQ ID NO: 734 - protein, 58 aa, Methanopyrus kandleri
MCEFTVKLGGEVIAEDVLYLEVTEEGVVLRDVMGEEQVIEGAQVKRIDMDEHVVELER

SEQ ID NO: 735 - protein, 218 aa, Methanopyrus kandleri
VLEPDTRLIVALDVSPDRAVEIAETLDGYVDGFKVGYEVVLAEGAAGIERVAEVLEESFLLVDLKTADIPEISRSIVERVSEAGANAAIVHGFVGPDVVEECAEVLPVFVVATMSHPGAREFYDRACRDIVKACDDIDGVVGYVAPATRPERVREVRKITDKLIASPGVGAQGAAPGDAVRAGADFEIVGRAITEAHDPVEAAKDLTRAMRTSRPAER

SEQ ID NO: 736 - protein, 165 aa, Methanopyrus kandleri
LGPELAAVSGFALKIADDLVDELSRPQWALPCGLVAAAAALASVATGVRPDLYLGLILGNAVAGKIDEIPHLAAAAIVALGVLITRPEVTPLTLLVITVLATLDEIIHPVEPTGLRPVLKIGAVVGWAFGVLDGITALAVITFDLGYHAAELLTGAIRCSNPIRA

SEQ ID NO: 737 - protein, 297 aa, Methanopyrus kandleri
VKRETFRYRGDMDLDGFLREMERVGALGAGRLGRAARILEKMWSSDDVTVLLTVAGPAVAGGLGELFERLIREGLVDAVITSGANVVHDALDALGGIHVCLGERNVDGYGRVHDTHIPTEAFEKFEHFMREVLSDLSGRVSCRELLWEMGKRLESGFLRAAADEGVPIYSPGILDSMVGLHVWIHSQDHDFHLDLVDDMHHLADLVFEAEELGAIILGGSVPKHFAMGAAMLRGGLDYAVQITMDRPETGSLSGAPLEEGKSWEKVREDAEVATIVGDYLIIFPLLASGVMQRLGIV

SEQ ID NO: 738 - protein, 257 aa, Methanopyrus kandleri
LWESRRKSEPRFPLSFSSDDVKSPDVAVVGLPRERVLPEYPTGQAEAPNAVRSAASTLDFYDPEVGDPLEILTLVDEGNLRTFEPESEPEIFVVLGGDHSITPEIVQELTPRRLLWLDAHPDLRRSERHDGALRGCLEIVDEVFLVGVRCWSREEYDVFREHEHVVSVDHGDITEVIDDVDYVSLDLDVLDPSVVPGVTTPEPGGLPYRLCADILRWAGRKRAHLDVVELCPTVESHVSPVTAARLVGEYLKGVAER

SEQ ID NO: 739 - protein, 136 aa, Methanopyrus kandleri
LDVAVKKVEVRQLKKGKYIMIDDEPCKIVEYTTSSPGKHGSAKARIVAVGLFDGKKRTLTKPVDAKVDVPVIERKTAQVVSDMGDTVQLMDMETYETFEVQKPEDEELASQLEPGTMVEYMEAAGKRKIVGIKEEE

SEQ ID NO: 740 - protein, 150 aa, Methanopyrus kandleri
LGVPKKYALVSGTGEADTSLAAFDAALIDAGIGDCNLVELSSILPPNAEEDDLPEFPPGSIVPAVVAKAVGRGLVSSCICVGRLESGLGIVSERAATDSVETVRRLAKRDVEEMARLRGEKLVEVRTVTASTEPEDAEWAAAVAAVVFWG

SEQ ID NO: 741 - protein, 337 aa, Methanopyrus kandleri
VRETVEKIVKERVLPEVSKVRRGWVEVGRGADGTPTMRVDEVAEREFLRGLEEEGVDARVISEESGEMRVGEAPEVTLVLDPLDGSHNASRGLPFYCVSVGIADPEAETLDDVEEGLVVSELLTFGPGDVEEKPVVERPLVSAYYYGSDRMPVEFSRGRFKLRCLGSVALELALVGKGALDGFVDVRGSLRPTDVAGAFGAARGELAFIFARNGRELDPSEIPLRPDFRFELATARSEDEARELFEALKEDVGIRVAQRLFGKHPEGLSEHALCGKLGEECCELAHAVGKEEGYGEELADVFALVMNLANELDVDVLTELRRKFRRVFGCSDRRSSV

SEQ ID NO: 742 - protein, 276 aa, Methanopyrus kandleri
MFRPQVVGVTGRTDLGRAVRVAERVCRLCDREGFEVLVDDSLGIGEYPRVNLKDMGKEVDMIITIGGDGTILRVSRITSEYEVPILGVNLGKFGFLTEVSESGLKEAVSRLARGDFNLEEHRKLRIKIGGSDEGDALNEVTVITSRPAKMIRYRLSIDGFELETTWADGVLVATPTGSTAYSLSAGGPIVEPQVECSIITPLNPFKLEARPMVVSMDRRVEIDVDDPERAEVVVDGQEYMNLDGTVSVTRSPNVARFIRFGSTYFERLKEKFLRWD

SEQ ID NO: 743 - protein, 91 aa, Methanopyrus kandleri
LDPDLPTNVLEEILKKSARSADGVLGVRMSAKKEYYRVIESLSLALAELSVLAARHAGRKTVKAEDVELAAATLDVISSIRDPRGRGGSRG

SEQ ID NO: 744 - protein, 143 aa, Methanopyrus kandleri
VLGGTQLTTYVLDTSALIKGVPPELLDGPAYTVPEVIEELKDDLSRVRYEVASVRVKEPEDWAVRRARRRAKVTGDLPRLSKTDLKVLALAIELMEEQDVVLVSSDYSVQNVALTLGIRVYGPVHGEVDEVIGPGGRRWRPSV

SEQ ID NO: 745 - protein, 284 aa, Methanopyrus kandleri
LETVGVTTVVTVSGLTGSKRVAARVDTGAENDSIDLKLASEIGAGPVIGVKKVRSASASRLRSERRPVVHVTLELAGRCLPSEATLADRRDMRYPMIVGRKTLRRAGVTVDPSREEEPEGDEVDPRRVVGTLKLHKRLLRTVGEKRAVTPAVLALQHGGAWSYRDGDVSSVAVPIRKLSNGVVREDLYLLLNPEIERAEGTLTRLEKCGRERVRRVAKRPRRLEVRHDGGAIIRVDPGRRRIRVRELDPGTLRLEGIPAANLHHELSHLMGDDLGPSVLEFEVE

SEQ ID NO: 746 - protein, 305 aa, Methanopyrus kandleri
VKGDTITVSETIRVATRSSRLAIIQTREVIELLERESPRDVEVEIVKTKSRGDVVRDRPLHKLGEKGVFVKEVDRLVLEGKADIAVHSAKDVPSVVDYPVDVAAVPPRRDPRECLVSRHGGLKELPRGATVGTSSPRRRAQILLERPDLKVEPMRGNVDTRVSKVRRREYDAAVLAKVGLDRLGMTSEVSEVYDPEEFVPPAGQGALMITCRKDDDRVKRLLEVVDDEKSRVEVETEKAVVRELGVGCSEPVGVHVRARDGDHVRLVLGLFEEDGSCGHVLKMRGSPEDVVREAVSQAREVLSDG

SEQ ID NO: 747 - protein, 263 aa, Methanopyrus kandleri
MGELYLVGGGLSDVRDLTLRALEVLASVELVLVDTYTSVYDVSEGDLKRLLNGFGGDPEVRMCSRRDLEERFFDLCEGYDRVALLSPGDPMAATTHVALVVEAADRGWDVEIINGVSVFTAAPSKSGLEMYRFGRTATIPLNVRSVYPYDVLESNRQAGLHTLFLLEVAEDGEFVSVADAARYLLEIEREEGRGVLDPSDLAIAVVRLGFEDELVAWGTLEELSDWEPGEPPQALILPASRLREAEREYIRRVLPHIRDVRGV

SEQ ID NO: 748 - protein, 118 aa, Methanopyrus kandleri
LGEETGGDYHVVLEAAWIVYNVDDEDDAINIAIAEAGKRLNRHGLDYVDIDVGFYECPECGNEIEGVWIVAGTALVRLILSMRVFNAESEEHAIRIAKYEIGQALEDVPLGVVEVTPL

SEQ ID NO: 749 - protein, 369 aa, Methanopyrus kandleri
LYVVPYNTGEALLDFFVITHLTIPFALSYSSVTVQRVLSLSLFTLGVLALLFTVDAFSLFLPVSRHEFTHPFGPLALAAWATSRYLLQLLETRGITAARRTRPYFNLLWVYVGMVGGIMHRDFLLSWFLCWALTEHFIAKYLKVESRFRAFAARAAKMSKRSIVMATLMAIGFLGLLELLAYVLNKPVFSPTLRIKRFAEYTVPGLEFVAKNTHIIGHSTKALPAGYEWRGFGDGFVTLPVGYLMMFRLDVPTLHGALVVKKDLLDYMLPGLFTWAFDFGYIGAVLLSIWVAATLYVGSRCLSEYIKLRRRRMTARFLAREAMLFGCLIAFSVQSLIGVFLFSRAMNSFALATFTLLSALIWAHLVRGK

SEQ ID NO: 750 - protein, 415 aa, Methanopyrus kandleri
LIPLIALLALVSGASATFNMIVITDPSGKDPNGAAAASMSFAPNMFQSTFLVSKKLHVAVLAGGLSKGTARLEAILACIRALELGEDIESAVRAGISRSPTDRLLVGGPGKGVAVGGSYDIAVVIVKGNKIIIKQYHSSGGPNIVRIPKNVKCAVIHLRNTPGNPMYGTATKVRIEAAIMAGRMIRDGLPATEIVTRIMGYVAKKSGEKYGGGVVNITAGLSTGDTFVPPKLNARGIPMDTAYRKVCPKCGWSVAYPAASKYSRCPVCGSSLRTEYAWQVARDMITVRKDQPIVRVYGIKSVYDKVSIVETVQTLVQAGKKQPEDIARAIDSDIDNNTLLGYDYILPGDVKVEPEANLITIYMRPLPEGYKKPPLKTPISPETLHSLGLISSAVGVALIVLGGIRELVNRRLRAW

SEQ ID NO: 751 - protein, 149 aa, Methanopyrus kandleri
VEEERKRKWIKPWPVSRRNLAIMLMGALLLSIGRIAEYTAWAARPVPKQEGLRIIGIDVVGCDFLPEEVIRSNVMASGLRPGSVIKGGTLITPEGKKIPLHEAIRRARIYAMRSVIPGTKIKPIRSVQITIKRSGVVVVRVIEDYGLPR

SEQ ID NO: 752 - protein, 480 aa, Methanopyrus kandleri
LKLTVRELAENVEGEIRSGDPDSMIAGWFSTLGRAKEGDVVIRWWLDDKGAEIASERGVACLVTEHPRGKLIERCDELGIPLILTEVDRANEYALRVAREKCAPDATAICVTGTNGKSTTNHLLHHILDTAGFDAYCNTDFRSEKNTLIDPVVAMELREERPEDYLCVEVSEVQGLPTGRIMEDHAYRMAKALKCELAVVTNVGVDHTNLVSSLEEMVDAVYGVVRALRKGGIAVLNRDDRYVRRMTREGVETVWYGWDEGYSHIEERDGEEWIVLDEEPLIPVREFPLPVDHFLYNALAAVAAAGALGIDREDIAEGLRTYQPLKRRFERLCDDPLIYDDFCHNPDGVLATVRALRRLGRSKVIVVFAIRGSRGVDINRQIARALAEGAKDLQDEGIHVHVIATSSEGLVDDANVVRPEERRAFLEELERSGIDYEHYDRLEDALERALDLADDDTVILLGGAQGMEPAREVLRDMGAI

SEQ ID NO: 753 - protein, 356 aa, Methanopyrus kandleri
MIIETFTLSTVTSAVTVGLLRKYMREANVVDRPIVTEHAHKSGMPIMGGLGILLGTASGPLLASIQALPPIASALPMMVLGIVDDLLGLQVEEFQKVVRNVSNRPIELGRLILQPGEEARVATEKAKRDLKRILEEDPDAIEIVGEVPIKKELSEREKLALQTGAALFVLPIVPATWLWIPKVGVWNLSYLFYPVAVFGIVGATNAVNLIDGMDGLAAGLLFLASLACSGVCLGQGQLPGAAFFASLAGASLGFLFHNRYPAKIFMGDTGSCFLGAAYAAGALYYKIEIPAMIALGVPVLSTLISLLHRAGVIRLAVEPLHHHIQYKYDLPEPVVVALHWTAGAVFAAVALWISVG

SEQ ID NO: 754 - protein, 379 aa, Methanopyrus kandleri
VKVLFVGARLLRDVAEYAGSTGVYRILTESNPRSRDWELADEVHFVPRGMEHPTRIARERHVDGVVPLIGVDDPLPAVGEMKEELEAEGIRVVASDRESVEIGIDKVRTKRAFEELNVPTPEWEVVENERPSISPPVVVKDPRSQAGLGVTVHETHKPRVSGRKLVEEFIEGAEVSIEVLSWDGEVVPLVPVFKGSTADRRHPIDRMRMSPAPIDPSVERKIRRCAVRVVEHLGLEGNVDFDVVVRENEFWFLEFNPRPSGTRYMTSGCTGIWPLRELVDMAADRWRPPKIRKLWCAIECPVWRPTDKDPLREMFDGGVYHVFYEYYGRFDVGGRVTVRGDSFKEALTRLRSALKAAGADVKRAEREYRRRLREIEEYL

SEQ ID NO: 755 - protein, 512 aa, Methanopyrus kandleri
LAELPWSTVLVIGVCGPVCNLAARVLAERGYDVIASDLRDECEFAETLLEYSNVELVLGGHPPEIFERAEVVVPPPSLSRDAKPYRLAEDHGCEIVEVKELLDMLPPTRPVIGVGGTNGKTTTVAMIRHVCEQLGLEAPHHGLPGMQGNVGLLPPLQARLPGDVSVLEIATFGKRGEILEAAELSQVECVCVTNITPDHLNEAGDFLTYARCEAELLEPDTIELAVLNAQDPLVVGAPEVVDFNGDIVYYGLDVEPFDTSEKECWCGGHVEVHEILPWVGPFKCRECGLRSPEPDYLATDVDLSGFRLICPDGEYEVRLPVMGLHNAYNALAAIAVCSEFLGLDVEDVVEALQSFEGVEGRLEVLWDDGERVVILDYGHNPAGVDATLRCVKEAYRERRVCAVIAVASELGPEGDEEILRRAADLADLVVVASYAAYEVMDRVDADNVIAAESATKPFEKKGTLGASREQVLDGLKEALRSDCEVVVLFGEAPLKYREEISEEVERVLGDER

SEQ ID NO: 756 - protein, 334 aa, Methanopyrus kandleri
MTSPPSSIALSGGKDSVATLIDAADRWNVKVAVTVVHEFTDKTCLENARKAAEHVGVDHEVVKLRLREWFARALKEGRPICTKCGRSVLTAACLRARELGCATVLTGHELRGKFGRRTTHPYPPGVTVVRYPALRRWTWEDIRDIVSSLGWFNPEYTCPIRPYGVHRFIEEVGYNPLTGRACTIMLEGVATPQEALAYLRETETPEEDPERVLDILGLEEKAAFPNGIPDGPRDEDEIIRDLTYRLLMYARQALRSLVRGTLNRVERRERFTQLYFVMSEYGKIDDRVEHLDIEAFVRLATGDREEAERLLRDVKKLMRSILAEYGRTIPGARP

SEQ ID NO: 757 - protein, 571 aa, Methanopyrus kandleri
VEEKELRDLVRRYALENAARYGGRANPNAVMKKIMKEHEELRPRAKEVLKTVREVVREVNKMSGEEIRRELEELGGPREDVARDKEGLKPLPGAEPGNVRLRFAPNPSGPLHIGHARAAVLNDEYARRYDGTLVLRIEDTDPRRVDPEAYDMIEEDLEWLGVNIDERYVQSNRIELYYMVCEELLEREGAYVCTCDPDEFRRLRDVGRACPCRSRDKEENLELWEEMLDGTFSEGEAVVRVKTEVDHPDPAVREWIAFRIVEEEHPMTGSRYLVWPTMNFAVAVDDHLMNITHVLRGKDHESNTRRQKYVFEHLGWDTPEYVHYGILKVEGAVLSTSEIRRGIDSGEYTGWDDVRVATLRALRRRGIKPEAIRETILEIGLTDVDATFSWEHLYARNRKMIDPESHRYFFVRDPVELRIEGMKESVLARLPLHPDRDEGERVLILHPENGVARALLDGEDAEDLWEGDVVRLMNAVNVEIEEVGDGWLRGRYHSDDYRIAKEEGAQIVHWVPPDQAVRCEVVRPDGSVESGYAEINVEREQAGSTVQFERLYFVRLEEVSSGGVRAVYAHD

SEQ ID NO: 758 - protein, 592 aa, Methanopyrus kandleri
LAEETTPRDPFSVTIRTIRTSIRDAISSVYEVDELIEVPIDENPPVEGADLATPVALSLAKELDENPRELAETIVEESDLDDVVFVEKAWVEGPGFINLKLDRSQYAALTLRSIFYYGEEYGSLDLGMGRPVILEHTSANPNGPLHIGHGRNAVIGDILARCMVFTNYGVEVQYYVNDMGKQIAMLAWKYIKEGRPEVPEGEKPDEFFGKLYTEAAREIEEDPELEEVVERFLRSYERYLVEEESRAERIADAFQTVVEECLRGHIQTLERLRVAHDRFVYESEFARDALEIVEKLLDMGVAEEREDGAVVVDLEDYGIDKELVLTRSDGTTLYTTRDIAYHLWKLGRATFVVDVLGADHKLAVEQLRAVLDMLEENPDRIDVVFYEFIHLPEGSMSTRKGRYVTLDEFLEEAKKRALEKMKAAGVAEELSDEEREKIAEEIAIGAVRFAIARVSPNKPIEFDWDEALDFRRGGPFIQYAYARAKSILRKADEEVNRFDAAYLNDDHSFELILKMSKFPRHVAQCVRKRRPDILAEYAYDLAKTFHTFYEEVPVLHVEDDEVREARLKLVEAFTIVAENLMNLLGIPTLERM

SEQ ID NO: 759 - protein, 409 aa, Methanopyrus kandleri
MAESSTVERYRFRKMIERLENLRGQGTELITIYIPPENRLSDVIAQMREEYSQASNIKSKRTRKNVQSAIEVVMQRLKMVGETPENGLVVLVGTVQDGTKEKMVAELIEPPEPVDRFIYRCDSKFYLEPLKEYLEEKDVYGILVMDRREATIGLVKGKRIEPVKRLTSDVPGKHKAGGQSQRRFDRLIEHAAHEFYQKVGEAAREAFEDVKDLKGIIVGGPGPTKEEFLDGDYLPKDLKEKVLTVVDVGNTDESGLREALNKAEEALKEAELVREKRLVRKFMEEAVNGELAAYGEEVDELLKMGAVEVLLVSEDLEGYKVILRCPECGYENIVTVKEKDEAKKYVEECPECGEAELNVEEIKDIVDYYVELAEQMGSNVEIISTETEEGAQFYNAFRGLGALLRFRPK

SEQ ID NO: 760 - protein, 223 aa, Methanopyrus kandleri
MYSVVALGGSVVNVDKPERIKETAEILRNGLDSGLKICVVVGGGPTARRYINVARNLGTPETLLDEMGIAVTRLNAMLLGAALGLHDLHVPETPVEAARIVRRNGVAVCGGTHPGHTTDAVAAMIAELLEGPLVIVTNVDGVYDKDPSEPGARKLRELRPEELEELAVRAELKAGGSFVVDPLAAKMISRGQIVTHVVSWEDFRSRGLENVVRGRHNGTIIEG

SEQ ID NO: 761 - protein, 63 aa, Methanopyrus kandleri
LTERVPPHSHCIVCGAAIPEGERFCSEKCRMEYERRRKKAATLQWMLAGALIALGVVLMLRGV

SEQ ID NO: 762 - protein, 248 aa, Methanopyrus kandleri
MIKTIRTPVGEFKLLVDSYQLDLLRDVRRVFVFTSMVAEVAEDTFADLGAGTGPLSVVAAHAGAERVIAVEKNPKRARLLEKNLRKHVPHDVEWEVVVGDARDVDVNADVVACEMIDTLLLEEKFVPVINAVLERYEPTIVPQEVRIGANPIRRPPRTPRYRPGLPEDIEPLEVIRTDKPIPKKFEYETPEPGYAFFTWVEYEGTIAGGSDVFCPVLELPTPGDVLIGVRGAGLPSLRSYTPEHQDHT

SEQ ID NO: 763 - protein, 179 aa, Methanopyrus kandleri
LLDTVKDYMSGVIKRKAKRGNLDIAMLIDGPNMLRKEFDVSLKEVRELVEELGNIRVGLAFLNQYASDKLIEAVANQGFVPRVIPGDVDVYLAVEAMELIYSDNVDAIALMTRDTDFLPIIAKAKEQGKVTIVIGADPGFSTALQNAADYVIKLKPRKERESEGKEEKPEEAKDVVSDE

SEQ ID NO: 764 - protein, 252 aa, Methanopyrus kandleri
MKRRWKLYSRVVRELIAEGKNDRVAAALALEGYRRPPGGDRVHDDIVTLIKTERGLEGASLHPEKCLRLREILGLKLKEVWRRFQEPQARSAALDAVASAENVEPEEEISLPRDYGRAVTLRAKIVADTAEKLGDEVILVGYSAHIARELRDRGILLQIVDEDPRLRVERNIKFGESVLLSTGMVLSNGSVRRFLASHKGPVVLYSQSCPHLTAVLTRQGVVDAAVVEEFPYHFSPGGECKLRVYEPERPAR

SEQ ID NO: 765 - protein, 114 aa, Methanopyrus kandleri
LSELMVDVHLLSHKPVPERRLEKEVSEALRRAGFDVLSVRATRGSDIVGAFRAVEYVILVDVRGEGDPEGPVKRALRDYGRVEVQVGSRSGSGECDEEALEALFEGSKGADSGG

SEQ ID NO: 766 - protein, 371 aa, Methanopyrus kandleri
MKELMGVEPQTEGQERLVEALLNEENEIVAVFGPTGTGKTLFCAAYGVQAVMEGEYDRFIVTRPLVDVATKQEMSSADLPEKFEEMVVTPVMDVLSRFTGRDELQQLVDEGKIMIVDTHFVRGRTFDDAVILLDEVQNMLPENAGEVLARMGHNSRLLITGDPVLQKDVDIDRCGATVMREVLAEEPKAEVVDLGTRDIVRPGAERGVHLQLEIRVRNREMNDVEREIMDVVQVEAPDADVLTVLYVEPIAEDLEIKTENVPQAVIVTKEGHVGRVVGTGGERIERIEAETNMRIVVTHLTLDFVDFIADIHPVPWIGERIVDVDIAGPNLKVWIDQKDFGPFMGQRGRYARYVEEVLQELLGMGLEVEQA

SEQ ID NO: 767 - protein, 271 aa, Methanopyrus kandleri
LKRVTGVNSRRVLRQAVRVSLKPVYKMYERILEEKVKEGRVPEHVGIIMDGNRRFARELGLEPWEGHRYGADKLEDVLEWCLDLGVKAVTVYALSTENLNRPKEELKRLFDLMEERFKALAESERIHRRKVAVRAVGRLHLLPTRVRRAIKKAERATKEYKDRFLNVAVAYGGRQEIIDAVREIAHDVKVGRLDPDEIDEGTFRKYVYVGDLPDPELIIRTSGEERLSNFLLWYSAYSELYFVDVYWPEFRKIDLLRAIREFQKRERRFGR

SEQ ID NO: 768 - protein, 165 aa, Methanopyrus kandleri
MMIGILSDTHDNLKAIERLASELNEADVEVVLHAGDYVAPFTLPVLAKVECDEFIGVFGNNDGERDYLREKAEEVGFELVGEIFTGEVLGLRVAMIHGTEEAVVEALARCGEYDLVVYGHTHEPEERVVGDTLVVNPGEVCGYVTGRRTAALLDPDEKKVEFVEF

SEQ ID NO: 769 - protein, 356 aa, Methanopyrus kandleri
LAALRTPVRRYTLRVNTLKADLEDVVECLASDFPDREVRESPYSEYAVEIEVKGPYPVEGNHHVVVADKFAAESVYVGADLYAPGVVQADPDIRRGDRVTVVSERGHPVASGEAALQGREMEKRDRGTAVRVDRPTFSAPKVRETEAYRRGWVYSQGLPSILAVEALSPEPGETVVDLCAAPGGKCSHVAQITGPESKIVAIDRSAPRLERMEARLRRLGIDWVETVHGDARKVVRRLRGTADVVLVDPPCTALGVRPKLWVEATYEEALGLPSYQYSLLRAGYEVLKEGGRLLYSTCTLTPTENELVVERAIRELNLEPETPVLRPARRSGPGVVFLPHRADVPGFFYAVLVKEG

SEQ ID NO: 770 - protein, 331 aa, Methanopyrus kandleri
VKRRAIPAMAAGVAVVLIMIWSFDPRKVLTVIARTEPRLFALAVCIQLVDLLLWALRWHLVLVRGGVKAPFRLVFAVNNVSMLVNNITPSARSGGEPLRVYLLARMTRYRARDIASSVVIDRVLDYFPLTLLLLLSAFLIAGSGGRGGILVILLGGVSFLTAALILSLWFLASERYVHRVARGVLRLLSRVSRRVRARRLWEELDEWVERFVKQLRELLQDRLTLIQGTLLSAAVWGCEILRTYVVFLSLGREVPLPVIVVSFTVSMFAGVLPLLPGGLGLVEISTASVYRLWGIDPGTSAAVALLDRLISYWMVNAIGVISLLRISRRER

SEQ ID NO: 771 - protein, 609 aa, Methanopyrus kandleri
LIFKKRKGGKRERPEIDLKLKPPEEGEGAPKLKLPKPEGRPGESKGAEAVPKLKLKPPKPSEKPPSGEEEEKKKEERPPAEIKPPKPPEERTAPSNLEAELERLKAENKKLREELDEWRNKAKSAMGERDRLRSEIKRLKEELEKQEKELDKYIKISKQLKEKLEKAKRESEELKEKAEEYRERYEKIAGKYNELKSKLEDLSDQNRRLAENLKKLKEKYNEIKEERDRLKEETKEVGKLKDQLAKLQSKLKEVKSERDDLANEVEALRNENEKLRKKIDKLKSELSNLQKKLKDREKKLEKARQHIGKLREEIKRRDEEIRKLRKAQSKLKDEIKRYEEGKRLLVPPETEMAIAKVKGSIVIGKNSMVKALQEDEPIVVKEEINVKDNSRIYGTIVAKNISIGSNVKIYGNVICENKLEIGEGSTVKGHVISINSLKTSADVIIEGSMVSGDDISLANNVEVKEVLITPGSVKASQGLSVAAVLCNDFESAGSIEADYILADERVKLGDDSFVKTVIVREGPVEQGVNSCVYYGSLSIKGRNPKLYINTEPFDDPVANRVFRKTISNVERLGPFHLAKSEKDAKFVLNRVTKMDIAEIVKELRESLKV

SEQ ID NO: 772 - protein, 313 aa, Methanopyrus kandleri
VGIEVKEIRPGRGRPELVYARAELVVHKESLKATLIGREGSTIREIGKRARELLEERVGKPFYLDLTVVVDPKRSPTNRWFKVRDSSEAWLCPAFKHPHLVSVRESRIRGNARVAAFVELEHVTVHGGAMISNFSSIRRSVLHKRVSVSSHCEIERSELGPVTFVGDGAEIHGCKIEERCFVGMNARLSRCEIGRWSVVGAGAHISDSRVPERSLVVGNSIVDRLDVYTLVVGKRLKLELNGGEIWSGQGEKYYVCYLPEDNRITVRPEPTERVLCEVRKANDKWEVRGEGFVRTVRGSSLHWYVGHERGLLG

SEQ ID NO: 773 - protein, 163 aa, Methanopyrus kandleri
LALPRIYVETDEVPESGKILLTDPEFEVIVRSRELAEKIAEELDEPIFYEQVVYEEARSVFDVPEAKVTRHVVIEPVDRRSLVFLKPGDRVYQIPVEGYVVTPIADVGDRLRKGDPLAAVTTRSGNVRYVEAPQDCLVVYVCEQPAIRTQRRPNYEYYIAPTE

SEQ ID NO: 774 - protein, 324 aa, Methanopyrus kandleri
MRSEILKELNRARELVDAKIEEVLPRGGPEDLYDACWHLIEAGGKRIRPLLAIKSCLMLGGSEEDVLPEAVAVELIHTFTLIHDDIMDEDDERRGVPAVHVKWGVPVAILAGDTLFSKAFEVAAEGGDVEAVKELARACTEICEGQAMDIGFENRTEVTEDEFLEMIRKKTAALIRTSCVVGGLKAGANREQLEALREYGENLGIAFQIQDDVLDLVGDESELGKPVGSDIVEGKKTLIVIKGLELADEEQRERILSVLGNEDASREDVREVIQILEDLGAIDYAKKRAREYADRAKAALRELPENEHREFLEKLADFVVEREF

SEQ ID NO: 775 - protein, 453 aa, Methanopyrus kandleri
VEPLTVEVFAVGGYGEAGGRNMTAVRVDEEIVIFDCGMSLDKSLVFEKDFQKASARELRRVKAIPNDPILRPHRSKTVAAVLSHAHLDHIGAVPKLLFKYKCPVFGTEFTIELVKADLRNEIRYADEAEDIMINLYTVEPGDEVQISSKLRLEFIPISHSIPCCVLPVLHTPYGAIVYACDFKFDDNQIIGYKPDYKRLKQLGKEGVLLLITESLRVAEEIKTPSESVAREMVNDVLRFADEESEGIIVTTFSSHIERIQAIADTADRLGRKVILAGRSMGKYGRIAEELGLLNLPAGARIYDRPETIRRGLERANKEKEDYLLIVTGHQGEPGAVLPRIVDGELPYRLTEEDSVVFSSSTIPSPINRANRYVLDTKLRLKGVKMFKDVHVSGHAGREDHRLMLRMLQPEFIVPAHGDPDMLAAYAELATQEGYEVNRDVFIMFDGTKLSLPL

SEQ ID NO: 776 - protein, 374 aa, Methanopyrus kandleri
LVRGSRAEGMRERKWEHVLACIWEDVESEESPLFDCVKIVHRALPELDFDDVDMEIELFGKRLSFPLIIAGMTGGHPKTGEINRKLARVARELEIGIGVGSQRAGVKDPEVRWTFEVVREEYPDGLVLANIGLPQLRENGPDLALEVVDMVDADALAVHVNVLQEAVQLEGEADAAGFVDVLAEVCETVDVPVVLKETGAGVSAEDAKLVRDIVDGIDVGGAGGTNWAVVEAVRSKAHGEIPLGYAFSDWGVPTAASILEVRSVVGNDLAIIGTGGVRTGMDVAKVLALGADCAGMALPVLRKVLAEGVRGCVRFLKSIAREVKIAMLMAGCSSVEEMSSVPIVVYGKLREWLECRGVPLDLVCTGDRRTGWNR

SEQ ID NO: 777 - protein, 239 aa, Methanopyrus kandleri
VFTVLKLGGSVITDKSKPKTAREDRIRRLMKVISDWRGDLVLIHGGGSFGHYAASRVSDLQKGVSEVRRAMHELLSIVEKVAVDSGVRVYPVTPATVLYSLNVLVDLLERGCVPLLYGDVVPDHDGDGFRIMSGDEIAERVSWLGPDRVGFGMSVDGVYPRTPEEGEPLRELSPDEARDLARQLEGSAGVDVTGGIAEKLRRAARIAERGAEVYMFDARDPENVDRFLRGEHVGTRITR

SEQ ID NO: 778 - protein, 348 aa, Methanopyrus kandleri
MKPVTLIRPSGEVTAKSAPVRKTLLGELARRLERRLGEVVRVRGPRLIVPGHHPNAASEFGVEGALPGYKVRPKPATILKATRRALRECPEEIRVDVRSHHDGVSGHALFESVREIVESTGRKTSKRGSRLLVEVYPDVAYVCGPEKAGPGGLPVGTQGRALCLLSGGFDSPVATWMVMRRGLECKGLHFLVTESELEAARENERVLRRWCPDFDLLVDESHREFLETAEERLTGRLKRYLCVVCKMRMLERASQWADRLGCDCIVTGDSLGQVASQTVWNLKLEESQVNGIVLRPLVGLNKPEIVRYGRRIGVPERDPGRCPFVPERLIVKPRKREALRAYREVIKG

SEQ ID NO: 779 - protein, 302 aa, Methanopyrus kandleri
LREEVASSPQGLGLEILAKHKVSDFVRHGAIAVKPDEPLWNALKAMVTHGIHGAAVMEDSKIVGAFEEDDLLRALRALEEDALAAEVKRFMKPAVVVKSSDTFQNAMVEMLKGNTTRAFVRSSGLLRSGVYGVISASDIVRVLTGDYRGFRAPGNTDRPVSPPKVGDIFWPGSVAIKQVIRNSPLTLDASSSVADVARCISEKGRHYAVLLEGESPIGRAGDKDVMGAALDAILNRRDLHDLTARNYLQEMVVVPPETPLHEALWEVIDKMSDRIYVMDGRKLTGVVPLIDAVYTLAKVASD

SEQ ID NO: 780 - protein, 398 aa, Methanopyrus kandleri
LVDLDCCVVCGDSPESIVDEVVERLGDRADFGIVFFHDIDPEDVVSELSYGVERFVGCVAGEGHYPGSVKGHKISLLALKTEWMAKFGTGGSARQDPGEASRGALEEAFEDLDFDPYDVSYSALNLKDPKRIVMYRPVIGITFIEGATFHNLGGTGLEVLSGFRFGSGPAAESIRTFGALSSDPELESAPVVCDKGVFESGAVYATISTFLKVSWSFASSLKPVTKLGTVTKSRENVIVEIDGRPAGEVYIEKLEEVTDYVKACPNEYVYKELPPLGVVRVFPSVGHRIIPRTPLEVTDDYIRTAGYVVEGEQLLLLGFDDRPNAPVRAYQGSLSSGEEPLASILVTFAGRKPLKEEIPDKHCVGMYSFGEIIPITGYNEFHNHVSACLTIFREPVFD

SEQ ID NO: 781 - protein, 170 aa, Methanopyrus kandleri
LRDVIRGRAWVFGDDIDTDQIIPGRYLTTQDPEELAKHVMEGADPEFPEKVREGDVIVAGKNFGCGSSREHAPIALKAAGIACVVTRSFARIFYRNAINLGLPLVVCPGVDDAFEDGQGIEVNLREGYVRNLDTGEELEAKPLPDFMMRILEAGGLVELIKREGPRAFEG

SEQ ID NO: 782 - protein, 335 aa, Methanopyrus kandleri
VAYKIAVIPGDGIGPEVIEAALHVIEPLIDAEFVEGEAGDECAEKHGDPLPEDTLELCHEADAILFGAAGETAADVIVRLRQELDLYANIRPVRGFPGLRELTGEPYVRDDVDFVIVRENTEGLYSGIEGRFRDTAYTLRIITEEGTRRIAEVACDLAEERGSNTVTCVHKANVMRETCGLFREVCKEVVESRGLEFEEYYVDAAAMFMITEPERFDVVVTPNMFGDILSDEAAALVGGLGLAPSGNVGDRHGLFEPVHGSAPDIAGKGIANPFATILSAVMMLEWLGEDEAAEAVREAVGEAIREGVVTPDLGGDKKTMEVAEFVREAALNRVQ

SEQ ID NO: 783 - protein, 236 aa, Methanopyrus kandleri
MMSIKMTIGATGAAEAASHGDVIVVVDVVNTSSAAEVALREGAVAVVGAAPDSAYRVLSGEHAAKYPFAETPEGVDPVERGREAGKIAVEEGCDVVLVVDGGEDNASLARKGVEDVGAEIREVVPNAGPRIKDVVDPAGKVFLFATATGGTLYDVAKTHGAPAVTFGTVVRRSFTRACVERALRLAGRYGAGVTIVVSSIFAPEDLDAGARIFEEACKVITESVCEERFEDVVSRL

SEQ ID NO: 784 - protein, 398 aa, Methanopyrus kandleri
VDRYPDENGYFGEYGGRFVPETLMPALEELEDAFKEAREDPEFWEELEELWRKYAGRPTPLYYARNLSRKLGVKVYLKREDLVHGGAHKLNNTLGQALLADRMGKDRIIAETGAGQHGLATAMAGAALGKKVEIYMGAIDVERQKHNVFRMELMGAKVHPVKAGTQTLKDAINEALRDWITNLETTHYLLGSVVGPHPYPWIVREFQRVIGRETKEQITELEGGLPDAIVACTGGGSNSIGIFYDFLDDEEVALYAVEAGGKGLDTDEHSASLCAGEVGVLHGCRTKVLQDEHGQIRPTHSIAPGLDYPGVGPELAFLVDEGRVTADAVTDEEALRGFVMLNETEGILPALESAHAVYYVKKLVERGELDRGDVVVVNLSGRGDKDVRIAAEELGVEI

SEQ ID NO: 785 - protein, 131 aa, Methanopyrus kandleri
LDELIKDLEEGAGEKGELLAEIVYERADSLEEMLELLEDMGMEGIKVDFVGDKEDPEEIVITVETTVTVEFYEENPEVKEEMGFTEPACELEQALFRKLAELKYDKSMEIEETKCQLAGDDICKFRIVPKE

SEQ ID NO: 786 - protein, 121 aa, Methanopyrus kandleri
LKYFKRLSDRERAIFEAGITLGAIYHQFCGTPVSPGTAEEVAKCIERAALLQPCVIDARVEVDVSSEDTDNYGGYTEVSGRNLRVTIVTRCGEWEAVGKLEFIEELNYPLMWVEEIRRVEQ

SEQ ID NO: 787 - protein, 427 aa, Methanopyrus kandleri
VTVIGIAADFDPPHRGHAYLLDRARDLGDEVVVFLNADYTAHHTPPLLPYRLRREIVLELGADEVIPVRGYHQRFPLAYTVPVRVRLMAEEGVDVILDAGPSRNLDRLREHVERVLEVSDLFSIPPNVPARNVVRWLAAVEYVNRELGTDVELLLIPELEGYSGRKIRAALRRSGYSPDSLRKVRRHLPRETFKKLERYLKARTPPIARRKELLDVLNRASSYELCSIAHLNTIAVREILRGRPFRSERQVWGALRRADYGSVLTRLALANTECRVTSDEIARIALSWCVERLVPENQSPDSMYRRDWFVAALSSHGVKARDADRLYKRADSYEEARRLARRRYGVDPGVPRFETLIGEARVSDGEYRPAISANGRLGVVEDGFQELRATAFGATLLRYVLDDPFVDAVIRVEDEEARLIVFPGDSP

SEQ ID NO: 788 - protein, 402 aa, Methanopyrus kandleri
VRRIWFHLDSKNRYSLAHVLGAVEARAPELIPYIEVSRNPDPEPGDIVVFSFNTFMAPEVFEVVERLHDDVVKLAGGPHPSARPDQCLEHGFDIVLIGEGEEVVPEVLRELIRGKEPEERPGVYLGEGNPQPAPRVEDLDRFPPYSEGFRIFCSVEITRGCPWGCAFCQVTRLFGPKLRHRSVEDVVRWVRRGVERYGHTFARFVAPDALAYGSPDGIRLKPDRVKRLLRSLRSIEGLEKVFFGSFPAELRPDSIAKGDAIELIAHYADNERVNIGAQSGSERVLKRIERGHTVEDVEVAVEKALEVGLKPVVDFIFGLPGETEEDQLASVELARWIIKRGGEVRLHYFMPLPGTPLENEEPAPLSSKIRRILGRWTQEGKAEGAWGHQMRLSKTAMKVLSG

SEQ ID NO: 789 - protein, 286 aa, Methanopyrus kandleri
VGTPDEALQDRDESPERVMELEVLVLSPAALYRRTVKALRDLTGFAREVVGLEEFGVGIVENPREYVRWLAKRVDEGTAEDALLTLVGGSGALVVRVGGDTYHVLIGPAYRSEESVKAALAHELAHLLQHRLKLFPKDVPRPAGAVRSVLLPLEVGAEELVLRELPEIGEVRIRMAQEEAREWRRTGDPILDLENALVAVPIRLAARRLGLDTSVQEPSIEDPELREVKEELVKLARGVDPWDQSDVERYTRKSVSILLDWLLDQDRHHSTSDSNNRKPSSEFRRR

SEQ ID NO: 790 - protein, 226 aa, Methanopyrus kandleri
LVRVAVIRFPGTNCDLEMAWAVKLAGGDPEFVWHEDGGLDDFDAVIIPGGFTYGDYIRAGAIAALSPILEEIRECAEDGRPVLGVCNGMQILAEAELIPGTLTVNVGNRFICDWVYLRVERTDTPFTTKYQEDEVIRVPIAHAEGRYYYENPEEIEDNVVFRFCGPDGDVSEEYNLNGSVGGITGVVNDDGNVLGMMPHPERAAHRLLNSDDGLRLFESLVEWCRS

SEQ ID NO: 791 - protein, 84 aa, Methanopyrus kandleri
VTQLVTVEVRVSLKPKALDPEGETVKRALHRLGYEEVEDVRTAKIYRIELDINDEEEAVELVDEMCRRLLANPVVEDYEIEVVE

SEQ ID NO: 792 - protein, 247 aa, Methanopyrus kandleri
MERGRLVYEGKAKSLYEHPEDENLLVMEFRDDITAFNMEKMDTVEGKGVYNCLISARLFEVLEDAGIPTHYVELADERRMVVERLDMFNLEVICRNMATGSLVERLPFEEGEKLDPPIVEFDYKSDEYGDPMVNMDHIRALGLATEEEVERMRELTLQVNEVLSEFLKDCDIILVDFKLEFGVNPDGEVVVGDEISPDTCRFWDAETEESLDKDIFRKDEGDVLAGYREAAERILRGDEEKLAMLPG

SEQ ID NO: 793 - protein, 416 aa, Methanopyrus kandleri
MPFLLEGARQLKTIEVGVAYGKDPHAVVEDAIDQLTEDPNLGLVFFSPKHIEEIESAVGSLPEGCKVIGCSTAGELTPDGYTYGTVIVALISSPYLAVETHRITFEREDPKHAREIGRNLVLGAMEKLRNPGPCLDINFNAMLTSLSEGRPIRALPYFIIELVEGLVPAIDYYMDGINEVVQKYKFLEVYGGAAGDDLRLERTYVLEGRTLCPEGSAVVAFGSTALKIGGALECGFEPVYEDRFPVTKAVPEERRIVEFDGEPAADYYADVVGKPVEELDDSVFMWNPLGWEIFGREIIVREPAFVEDDGSMIFHSRSPAAGALIRLEPTEENMRETARRVTERAMRRADIRDPEEIALVLVFDCAHRDCDAQYDAIREVVGDDVPIVGFKTYGEHGQLESGPVGHFNQTIEVVDR

SEQ ID NO: 794 - protein, 395 aa, Methanopyrus kandleri
LTSTSVVIVSREITKGVSEIRVGLVIHGPTVIDTGWAERILRSLKRLGEVRAKLGGTTGYVALLDAGLDSVVEFDRKLPSECLSELNEWADVLVLTNHGKSRESGLAFAEQVLSRAEGVDSLVQAERPGEPDGGIVLWNPGDAERTVAEHLREDLGLKITEVRTVRTEKGGGIGKSRRVACVEPGDRILVNGITVGVAESRNVELVFDDSGYLVEIRGGRIKPEGVERLGRVDPERVVVKTDRRLRRTEPERKRVKSGPERIHRVLLVDHDAERKVEDMRRSDAVVSVGDDTTCVCAELGDRLGVWVIGLVDLDPDGWVRDDTRESLRSSENLAALLVCERDDDAGKLVRGRFFRDREMRVLDPPVTVGELVEEVKECVKEVLKCVYHKAKETSA

SEQ ID NO: 795 - protein, 327 aa, Methanopyrus kandleri
LNLRELARELRSFEGVTRKHPVKTVVEGLLEPLDVTFEGEVIADVGEDAAAVKVGDDILLIAADGIWGKLIDRDPWWAGYCAVLVNVNDVLAMGGRPVGLVNVLSTSDVDVCREILEGMREGAWKFSTPVLGGHTHPDTPYTAVDAAIVGVTDEEHLVLSSTAEEGDLIVFVIDLNGRPYPEYPLNWDTTTMKDPDYLRRQMEAVVEASKLVKAGKDVSNPGLVGTLAMMLEASGCLGAEVWLDSIPKPEDVDMVTWLKMYPGMGFVYAVDSERDVRAIRRVLSDARLEVSVIGEVTEDGVVKVSEGDESARVFDFREDRILGVSPR

SEQ ID NO: 796 - protein, 511 aa, Methanopyrus kandleri
LRVYVDGEPVDVPEEATVRDALEAAGVSVPEDVTIAVFKGEQKVERETDRLRIMLETGDEELSLTVAVEDERMSEVCEELPGASVSWTTRDEVGLGPVDVSDLEFHTRRGVEVPPYTAILILPTNDPSEAYFLITKRRMAVEYICTDIHGRVTAGRELVDELRGGERVTHVEPVVERATERVVSRVTLDDGLEAGDRIITRVEIELEKNAPVSAEHLLNTLEMEEGRLRIKFRTDTFTSIEPRPFYDLPEENVDMRERGVVTVRNRGVDEGVVYVYRRDRTPVESHNVVGRVRRGMELLDVVAEGDRVLVETDPPRVNFVGLTVDEARELAEEFDVELEVNGDGDVVVDQEPRETLNVLKERKVRVEVVPEDEVIEIELYEDDAPRSVEYFRRVTKMLDRPVGRLKVHFAYADLGMIVFEGNEKLGKKLPPENNPKDRVEAGVLGVTNQAKPHAGLIGVRLEDSEEYGPTGETFEGTNVIGRVVEGLGRLREMDQSDMGRTVYVREVRGER

SEQ ID NO: 797 - protein, 435 aa, Methanopyrus kandleri
MKVLVISPEYYTYGAIVVAGVCEEHGHSTILRRSPDPEALKRADVLILSLHTTLHLLDEDILEIARQAHEFGKPVIVGGPVSQVPELVLERFPNAIVAKGEAETGLPPLLQTLEDEGDFEDVEGIALLRDGEIVDTGWPPPADLDGPSPLKVPRDLGRQDVRGANVYIETHRGCPGACTFCQVPEFFGRRVRWKPVEAVLEEVRELTRGGARRFAISGGTVTTYGDDEEDFVELLKRLADLLGRENVSAPDVRADLLNERLLEAIRDYTIGWIFLGIESGSDRILRAMRKGITVDDVCEAVELARTVGVRVAGSFIVGYPGETEDDLEATEELLTELNLDDVFINLAEPIPGTELGRLVTELPEEEIPVLRPGEQLETEAGDRALQLQLTAFTTLSRPVPLTDDVFHEALHNIREDERKVLRITRFLRGAQGCTG

SEQ ID NO: 798 - protein, 420 aa, Methanopyrus kandleri
MRIAILGGTGAMGRLIARELRDDGHEVVITGSNPHTAERVARELDVEAAPTNVDAAKDADVVVVSVPISVTEDVIREVAPHVPEGSLLTDVTSVKVRPVRAMLEHAPEDVYVLGTHPLFGPTVPSLRGQTVILTPTERSGPWTRRVRRYLERKGARVVETTPEEHDRTMAVVQCLTHAVLLAAGAAIGRFLPSLELDIEEVASPVYRLLMDVVGRIAGQDPRLYAEIQAFNPYGDEAREELLRALRRFHEHAHDHNALTEYIAESRERLGRELDLEACQRRTDKLLSYLADELRILQEGIEAILLDVYTNEALEGEVTGDRDTIRLDGRELPRDRYKILPRCPKELAHFDGEVTVLELRTGADPGDVAAVVDALGRNLRALRAERRGERVRVEVEYTGKESLEGLLRKLRALGLEVRVAR

SEQ ID NO: 799 - protein, 668 aa, Methanopyrus kandleri
VRSIVTSEHGGHYLTEEFEWKLTEEVVEPGACALCGTCVAICPGGIIELTDEGPRLTEECARKGTGNCHTVCPRVDTAAYHLGLRIAGRDYEPLTGGYRRAVGAVAADSDLRELGQDGGAVTALARYALEEGLADAVVGVTAGSAWKPCVTVVEDPEKVKDLAGSKYTRVGLVEALAEAADRGIERVLAIGLPCQVNGLAKIQHFEIVAKGARALRNIDGSPAEKLPEVVATIGLFCTKNFEYEGLVKLLREKGVDIEDVERFDITSGKLRVEISGGETKEYDVKEFEEAIPEGCRICNDFTARLADVSVGSVGTPEGVTTLLIRSETGEELVEGAVEAGYLRLRDAVNGSDVRRLAKLKCDWAMKEAKNRLKEGRKVPPFWVGDYGGVITRADGTFAVRLKVGPGGWVDDPDIFRAISGFLEEGYRAKFTDRQQLEIHGIPATEIPEVVERLRETGLNTGSEGPLVRTIMACPGKDNCSSGILNTEELARKLEEELAEEPTPYKFKIALSGCTNSCVRPQHHDLGFAGAVRPGVDPEKCTGCGQCVDACKVDAIRIITVGGQAAVADTDYKRCVYCGKCINVCPEEARYAEKEGIIVWIGGKGGREPVEGARLDVFADPDSIPTIAHTVIETYRELAEEPQKERLADTIRKHGLRQFTEAIRRVLSQ

SEQ ID NO: 800 - protein, 127 aa, Methanopyrus kandleri
MLADVPFVTVRRLNVTVRDVLRCVLGLRDVEVDTYFALLERGEATVYDLAEELDRDRTTVQKALKSLVYAGLVTRRKETRPRGGFVYVYKAVPFEEARKIVLRALDEWYEAVKDALERADVPRSGPE

SEQ ID NO: 801 - protein, 203 aa, Methanopyrus kandleri
VIQSPDGTYVVRLALPPGFVKAEILRTVAELAERYASGEVHITVRQGLEIPEVPPSKLDDLLRKLRELGLEPGSTGPRVRQVTCCPGTRTCANALTDPVPLARKLHEEFLDVWVPAKVKIAVSGCPRGCTRPSENDLGLVAVGGDEWELLVGGYRVARLPEQDVIDAVELTLEWYASEAPPGTRLHRFVTDRVSELRDVLERL

SEQ ID NO: 802 - protein, 421 aa, Methanopyrus kandleri
MLPMLFTLLLLAGPSQAAELGPADVPGPGTASNPPALALQSDHALIAWKSPEGLGIAVAKADGRVLVKTGIRTPVASYPAAAPWRGERDLATFVLTVPLMTPEGPRIDVDLVEYSDNVCAVLWTGLSVRGDAAVPVRVDDSTFALVYRCEGKLRVRVFGNVDGVWRWITDEQGQPVELKLSAPGPVERFSVSVAGRPVTTYLLVAYETPAGTEVVAVNLTDPAHPTIDGAPIPVPGTRPVLLDNVLAYVGADGVHAALLVKGTAWKIASDVKVADATDVRPAIVSYGVDRYLIVYGGSELRAAEVRIEGTRLGVVREGTLIKEPGYSPTGIGVVRTTERSLEVAGVILAFYARDGEPTVHVEYSEGLGELPTQHRRRPVWIVPLLLAASIGAYIGLKLPVYGQFLWLIISRARREVPKHDP

SEQ ID NO: 803 - protein, 178 aa, Methanopyrus kandleri
LELEPRTVVLRLGHRRERDKRITTHVCLTARAFGAAGVLISGDHDESVIESVEDVVERWGGPFTVQWVGNWRRVIKDWKRSGGSVVHLTMYGLHIDDVIGELRGENELLVIVGAGKVPAEVFELSDYNVAIGHQPHSEVAALAVFLDRLYEGKELHREFERARLRVVPSEKGKKVERL

SEQ ID NO: 804 - protein, 232 aa, Methanopyrus kandleri
MTVEIAVISDVHSNLEALKRVLREVRSADMLVCCGDIVGYGPRPVECVDIVREWCDRCVMGNHDYGVVTGDVAYFNIAARIAVEWTRRQLDEDRREFLAKLPKTERFEVEGVSIFLVHGSPRDPIWEYVFPHTPRQLLEKLVDKAGTDVLIMGHTHVPMYDEVNGSYVLNPGSVGQPRDGDPRAAFGILEVSNGRIVSWDVHRVAYNVDRTAREIEERGLPEELGARLYRGV

SEQ ID NO: 805 - protein, 262 aa, Methanopyrus kandleri
LDPHETMRRALREGGVHRVRMSEPGRRLVVDSVGPYLRYPIVTAFVARRDDGAIVELVAFRDESVDVIETALAVEHREKGRDILVDANLKPLEDMYGVEADKEEVDRVVYAKVHPELHRLLGSEWLSVRFFGPTVGLGSGDVPTLVTRGLGAHIVSELLGEEPAFIDDGEKTHRPYQEVPPERVEWVLAELTARGYGVVFTKPAVEVLYTLCREGYASPDRVEWVYRTQRSWCERPESWPRRSIAERNLEALEYGLELLRDV

SEQ ID NO: 806 - protein, 363 aa, Methanopyrus kandleri
LQRITIVALILSIAAVPGSADLMNPVYLTGTLAHELGHALVEAEYYGGIDEVQLDVFPPKILFHCRDGKCIDIHAEPPIGFVTRGPYDPGTPEEELRKRHKEAMLLYIEDPARFFDNVSREDAEVTMAGPVVGALISAALSPLDPQGAFDSAWDNLLNLMPVEIHGALTDGKIAWEALIRGRYPVERYLIELGLVTLSVLVTAAQCPRYALETIESDFVLTLELAPIALLDDLSKAVLGNLLGLAVKLREPFFVPGIWVGWNLSLLGPDHRKWLFALLDALGWTLVIPWLDMPWKLYAIILKLIDATADLDPGYPSLGSYLGRLKVPFIVFLLVSLLQCHPFLEDSKGIIIMEGSRLRRNGPA

SEQ ID NO: 807 - protein, 261 aa, Methanopyrus kandleri
LITLTTDFGLGSPYPAQVKAVILRIAAPGVDIVDVTHEVPAQDVVAGSYVMSVACPWFPPGSVHVGVVDPGVGTERRAVLLEAERGDFLVGPDNGLLIPLAEELGGIVRAFRILEDEVSDWEVSATFHGRDVFAPAAARVASGESPERFCEPLDPEELVEPPIAEPEVDDGHVRAQVWFVDDFGNIITNVLYDEVDLPETVTIRVSGESFEARHVHTYGEADSGDLVVLRSSSDHLEIAVVEGSAAELLGVSTADRLEILY

SEQ ID NO: 808 - protein, 499 aa, Methanopyrus kandleri
VFITSKEMRRIELNSRWLGFEEDFMMENAGAGVARVVIGEYSPNDVLVVCGTGGNGGDGFVTARHLDSEGVDVDVLLVGRREAIKNEAAELNLRRLDRAGIPVQEVRDSEDLESVDFERDVVVDALLGFGIRGRLREPVRSAVLRINEASRAGTRVVSIDIPTGLDPDSGETPDVAVEADLVVSIHRHKRGVRKLRDVFLRRVNAGIPEIAERICGPGDLITSDIWRRDPWSHKGQHGRVLIIGGSRKYVGAPQLAARGALRAGVDLVFLLTVDAVPKNDPNVIYRAVPAERLEPEHLDEVDLEGVDTVVVGPGLGADADSVGILRELAESFDGMIIVDADGLRGISGVNVDDRFVLTPHAGEFRREFGEELGRSLEDRSEAVRRVSEELGCTILLKGRVDVIGSPDGEIRWNVTGTPAMTVGGTGDVLAGVVAGVAARCREGFEAACIGAFVVGSAGCLAERRLSQGLTAEDVAEYVPKVLRNPWAAEPEAVTEVRRD

SEQ ID NO: 809 - protein, 259 aa, Methanopyrus kandleri
  MISC_FEATURE (22)..(22): selencysteine
VEVHELTILGGTDKDGRPEPVXELTLERGTIAAVVGLTGSGKSALLRDVEILAQGDTETGRRILLDGEEPSDDLRFDPEHRLVAHVTQTMGFLADCTVREFVEIHAESRGVDVDPEEVVDVANRFTGEPIDPDMKMTELSGGQSRSLMIADVALISDSPVVLIDEIENAGICKHEALDELTARDKIVLLVTHDPVVALRSDFRIVMRNGAMTEIVETTQREREVAELLERVDTWLLDLRNRVRCGERLDDVEPPAGIET

SEQ ID NO: 810 - protein, 236 aa, Methanopyrus kandleri
VKLVIVSGTPGSGKTAVILHALERLLDQYNPAVVKVDCLRTDDHEVYRERLGIPATDALAKDMCPDHFAAYNLEHMVRWAEEHGADLLVVETAGLCLRCAPYVDACLGVCVADVTLGPNSPAKVGPFLQTADVVCVNKGDLVSQAEREVYVRKVAEVNPDCRVIETNGLTGAGCELLARLIEEEAPELPDTLDEVRLREKAPLAVCTLCVGETRVAERYHRGVLRRIDGFTEYRGE

SEQ ID NO: 811 - protein, 226 aa, Methanopyrus kandleri
LTDSRSTEVSKLVELLPGFHCGACGYDRCDDFAEALVRGEAKLDDCPYLQTERFAEERRRLEKLLEEIGEAEGARPSITGVLDGYEADLVLSPLPDEPACREILHPFWSEADIEEGDVIRYRPWGCPTTHFARVLDAEKGLLTVHIVGPRHRLGETDFEYKDVGLCLVVGFEGIVSEGRVPNVGETVRFVPEHCMMQKVHSGVVIEAVGDRLRIECIDLKVWAPPK

SEQ ID NO: 812 - protein, 304 aa, Methanopyrus kandleri
MRAVPRCVPCVLEIAVNTVERAVPEDRQKEAILAATERVSELYRMEPTPQPPRLGTEAQRTVMKYSEDPDPYREEKRRANERAAAVARELESDLENIEDPEELLKRAAAAAIVGNTIDFAVAGHEFDLDELREEISSAEFAVFDLKPEDLRGARVLYLCDNAGEIALDKLLIEVLVEELECDVVVAVRGGPIVNDATREDAEQVGITEICDVIDTGAEMLGLLATEVSEEFAEELSSADVVISKGQGNFESIPEEPFPDVPVYFLLRAKCEPVAEELGVEVGSNVALRWEPEDENVRRWREIVR

SEQ ID NO: 813 - protein, 414 aa, Methanopyrus kandleri
MRRQLPLEPVAAEKVEEEYELVTLLVCDNCDYFEFKPHDREVVYERKGKCPKCGGTLLVEGVFRTDADPSMFPSYKDVKSVERALESAGYEVKEFRVREDGSVVFHYERKGDAHRLARKLAEMKFTAEPEGKAGRLVVQRFEVPEQEPGWLALLGLSVPVFAYLGGWLAFGSTWAAVEFALAFSAIYFGKEIAKLWVAKVEGLRPRLPFFLAVPPFPGAFSSVIRSEVRPMLVESLCRVGVAGLVAGFLLSTAMFLLGSAFDHTPVRMLVWHNPWTLLLSRELGIVANPITLAGWAGLVITWLSALPVYPLEGGYILRYYYDTRTVKWFSVASAFIQGWLHWYHIAVATVIVLVKITAKLPSDRSFLDDDESKSWLPALLLVALFVLLISPAPFGLWPLEHSKVPHNLQWLFLR

SEQ ID NO: 814 - protein, 143 aa, Methanopyrus kandleri
MSPGVRALSVYQAELRIKSERRVQVIDVTDQVREKVRESGVEKGIAHVYSRHTTAAVVVNEPESGLLRDIVNKLEELVPQGAGYEHDRIDNNADAHLRALLLGSSVTIPVSDGDLVLGTWQSVLFVELDGPRSRRLLVTVVGE

SEQ ID NO: 815 - protein, 244 aa, Methanopyrus kandleri
VELPSMKLPSAHVEPLKLATAIVIALLLVKIMGRAARAVRGKLEEEDLQDLGWWVEKTLLYGSYLLAFSIVLESLGVSLWALVTGLGLAGAGIAVAARDLIANLLAGLYLALERPFEVGDRIRVGEYSGEVVDLRIRCTVLKSRGRRIVIPNSVLVNETVEKLDDSDECEFEVVVEGSPGEIGRRLAALEKELDSLKLKYYEISVERVESGRTLVRVRTAGKEVDSVHGAVRRALVKRPGGTDR

SEQ ID NO: 816 - protein, 300 aa, Methanopyrus kandleri
LVEINGVPVEDTFCEAFKGLYARFIVTAADERPLREAAENVAALPATVFGESEAGVERWLDPEETPDGRPGFVAQMWVEYGDDAVKKLEHELGKRIRQGVLVRPTTRVFDACEDPDGYIDTERPIGRCADGYEYTDVRFDREMVHVPIMMGEFLIERRLGYAEGVAGGLVWLFCEDVDAALEAGYRAVEALRDVEGVITPFNVCAAGSKPETIYPDIGPTTNHPYCPTLRDRILDSKVPEGVEAIPEIVINGVSLDVVKRAIGIAIEAATEVDGVVKVSAGNFGGKLGDYRIPLRECIRE

SEQ ID NO: 817 - protein, 297 aa, Methanopyrus kandleri
VLDVVGLGALNVDELLYIPRMPERDDSVPVERRVRRGGGSAANTICWLAHLGREVGFVGKVGSDDAGDLLLREFEEYGVDTSRVVRGDGHSGTAFCLVSGDDRRILVDPGVNDELRPDEVDLDYIRKARVLHTSSFIGLRSETSLETLKRTMKAVADELMVTFSPATMVLRGWSYLEPYFEAADVVFLNETEAVHLTGDIEETLNRLAELVEVTIVTRGSDPAIVQEGTEISEVAPEPVPEEDIVDPTGAGDAFAAGFIEGILRGEPADRCCERGHAVAAECLRIEGCRPPTEGRSE

SEQ ID NO: 818 - protein, 252 aa, Methanopyrus kandleri
MGTGGRGRPTPGLNVYEVFLSLQGEGKFVGEPQAFVRFSGCNLRCAYCDEPASRSSRRRALIRRVSGEVELELPVPCGPEDVVEVLVELEDLEDTFGTVSLTGGEPLVQPWGALKELIERLRERGFRVLLETNASLPDRAPLIDELADVVSADVKLPSHGPNMDDFPDRCLRFLERISAEVYAKVVLVDEECYQHAESALKGLHRLGVEPIYLQPATGSEHDLEDLWELAGLVNADVRVLPQVHKLVDFIPR

SEQ ID NO: 819 - protein, 160 aa, Methanopyrus kandleri
LPRVYLDGRELGLRFSACHVIPGHGKCGRLHGHTYHVSVELLGERTEPHGFVYDFDELKSTVRELIKPLDHRVLLPTESELFEIEESGNEITVRLSDGKRYVFPREDVVLIPTRSLSAEDLAEYLADELERRLAGDNLKELRVRVDEGWGQGAEVVRRLD

SEQ ID NO: 820 - protein, 590 aa, Methanopyrus kandleri
LPVVTIHYDKLVKILGREVSFEELAHNLIPMLGSDVERIDEREMVIETEFFPNRPDLYSVEGVARALKGFLGIETGIPEYNVRRSDVEARVEESVLDARPCLAVAVVRGVEFEDERDLEHLMEFQEHLHWVIGRDRKKAAIGIHDFEAVEPPLRYFLADPNDRSWAFEPLDHPGEEMTPAEVLRRHEKGRQYAHLVSDGAPILADEEGVISFPPVINSERTRVTQDTTDLLIDVTGTDWRSVLDALHVIVCNLAERGAEILTVEILGAYERTTPTMELDVWDVPVSEARKLLGIDLSGEQLEELLERARHGAIFVPEGERELREYPLPDVYHIEADWREIPPILYEEDVVRVFVGPRRTNILHEWDLIEDAGIMYNYDRFEPTVPDFYTPSRADREREFINVVRDTLARMKFVEVNSLTLISPEENYRKMRLEPDGRAVKLANPIQKEYTIVRTWILPSLMRFLADNKHRPYPQRVFELGEVIERDEDAETGAKDRWKLALAIAGPGVGFSEIKSVVEALLRELDVTGWEITERKHRSFINGRCAAVLADGRELGFFGEIHPEVLTEFDLEVPVVGGEFDVAALRTAAGW

SEQ ID NO: 821 - protein, 407 aa, Methanopyrus kandleri
LEQIVKNALERVEREQGGDDPPSSRGTDDDQELMEVLERARARILVVGVGGAGNNTATRLKEEGIGGAEVIAINTDAQDLVSCKADRKVLIGYELTRGLGAGGDPRVGEEAAKEDMEKIKEVVEGADMVFVTCGLGGGTGTGAAPIIAEVARKEGALTIGVVTLPFSVEGRRRIENALEGLERLRQVADTCIVIPNDRLLEIVPDLPIAAAFKVADEVLINAVKGITEMITQPGLMNLDFADVRAVMENGGFALIGIGEAENDSESGSRAVQAVENALNNPLVDVEVSGATGALVNIVGGKDLTLKEAEEVVELVASELSEDATVIWGAQIDEDLNDVLRVTVIVTGIEDADLEAMFTGPRQPKRTEVKEVAAESSRPEKVPEVSKGGAESSEDERPSSLEDLEKIL

SEQ ID NO: 822 - protein, 61 aa, Methanopyrus kandleri
VSTYEELISLLRDCKRVLRAARKPTWDEYIESAKIAGLGILIVGGVGFLIRVIVQLIELYT

SEQ ID NO: 823 - protein, 163 aa, Methanopyrus kandleri
LAETDSTKLYAVRVQAGREEATADMLVMRARRKVKEEGIETGLKAVIAPEELRGYVIIEVEELTDELRDLIHDLPDTRGIVEKPMDFEEIEHYFAPKPEAVEISEGDVVEILSGPFKGEKARVVSVDESRREITVELLEAPVPIPVTVKMDALRLLREEEYEG

SEQ ID NO: 824 - protein, 166 aa, Methanopyrus kandleri
MPKEEVEVLIEGGKADPGPPLGPALGPLGVNIQEVVEEINRKTKDFKGMEVPVKIIVDTETREFEVKVGSPPTSAIIKSELGIDKGAHEPRHETVGDLSMEQVIKIAKMKFDDLLSYDLKTAAKEILGTCGSMGVTVEGKDPKEVQKEIDEGKWDDLFEKYEEEEE

SEQ ID NO: 825 - protein, 214 aa, Methanopyrus kandleri
VTITEEDLIEPLRKVVEYSPPRRFLETVDMIVNVKGVDLSDPSQRIDKEVVLPHGRGKPVNVCVIAEGEMAREAEEAGATVINREKLEELAENVREAKKIARRHEFFYAQVDLMPDVGRVLGPVLGPRGKMAKPVPPNADIRALIERAHRTARVRMRDQPVIHTVIGARNMEPEQLAENAMAVLREITSELEKSWAQIDSVYVKTTMGPAERVY

SEQ ID NO: 826 - protein, 362 aa, Methanopyrus kandleri
MGDCAMAVKAKGQPPSGYEPKVAEWKRREVKELKELMDEYENVGLVDLEGIPAPQLQEIRAKLRERDTIIRMSRNTLMRIALEEKLDERPELEPLLDYIEGPVAFIFTNLDPFKLYKLLEESKASAPAKPGDIAPEDIVVPEGPTPFEPGPIVSELQQAGLPAQIQDGKVVITKDTVLVKEGEEIDEKTAEILKKLEIEPMEVGVDIVAIVAEGTLFERDDLAIDFDEYEDMAKEAAQHAFNLSINAAIPTAETADVIVAKAHTEALNLAVNAGVPVPDETVMGCILAKAHGEMLALAGAIAEVDEEALDEELLEMVSRSAEAAERKEKEEEEEEEAEEEEAEEEEEEEEEEAAAGLGALFG

SEQ ID NO: 827 - protein, 180 aa, Methanopyrus kandleri
LPHNVVLTGRPGIGKTTVCLKVRNVLEEEGYTVGGIYCPEIREGGRRIGFEIVDLTEGDRYLLAREGASGPRVGRYGVFVDNLERAAESIERAVKRTDVVIVDEVGPMELKSNAFVDAVRRAADAHTPAIFVVHERSRHPVVVDLREERPDVVRFRVTLSNRDELSDRILEHVLEWLEER

SEQ ID NO: 828 - protein, 556 aa, Methanopyrus kandleri
LEHLECDVLVIGGGGAAARAAIEAARRNLNVVIVSKGAVGRSGCTVMAEGGYNAVLRTADPDDSFDAHFRDTVEGGAYLNDQDMVEILVREAPKRLLDLENFGAVFDRNEDGTLAQRPFGGQSKPRTCYAGDRTGHEIMMALLDEVRRLDGITVLERTMGYGLVRDHDGRVVGAVCVDLQTEDTIVITAYATVLATGGAGQLYPVTTNPVHKTGDGYAMALRVGCPLIDMEMVQFHPTGMVYPESVRGVLVTEAVRGEGGRLYNARGERFMKRYDPERMELATRDVVARAIYREIKEGRGTEHGGVYLDVTHLPDEVIEEKLETTLKQFLRVGVDIRNEPMEVAPTAHHFMGGVPIDADGKTPIPGLFACGEVTGGIHGANRLGGNALADTQVFGYRAGRAAAELALKLRRRGRRIQVRKTDAPTVESEIWSTVGQEDPIRVREKLRETMWEYVGLERSEKGLKTAIKTLNELKETVESGLDDEYGLRPVLEVRNMVEVAIAVARSALYRTESRGAHYRSDYPERDDKRWLRHTVYRPNGSLATRPAKITRLDPRQ

SEQ ID NO: 829 - protein, 599 aa, Methanopyrus kandleri
MARSNRRGGRGDPEDDPAWAPPGHRCAGERAVGGPTVIPRAYLPAVPAGGNESRAFQGRFVDPWFSGIRTGYVIWDGGRLLGVTRNEPEHADVIDVDGIICPGFVDAHVHVESSGLRPARYAEIVVREGTTAVVWDPHEVVNVSGELGLEWAVKTAEEALPFKFYIALPSCVPALGPPYETVEGEITVDVARKFASHPMVVSVGELMDVAGVMEGEKDEFIELKSLYGLTVDGHAPGLTGFEAMRYFAAGPETDHECSTAEEFTSRRELGVWTFVRQGSSSKDMEVALETLEDLRGVCFVTDDLHVKDMDEISLRKIVGRAIEAGFDPLESLSAVTLNPSLCYGLQSGRLVPGFHADIVVVEDLDENMELTDVWIGGKRSERVRFRDAEAELPDVELSVDPREVSFQDGKYEVRCVGLVRGSIRTEEIVREITVKDGAVKDDDVAFLVVTDRYGQGSWSIGFVEGFEELDCAVVSTVAHDSHNVVVAGRRLDDVRRALQLVSEVGGCVGAVAGDRAEFVRLDVAGLMSSSDPEEVKKSYEDVLELIRSSSGVDWDPFQALSFVTLPVVPELRLTDRGLVKVEPDEIRFVDIITDGDPVE

SEQ ID NO: 830 - protein, 353 aa, Methanopyrus kandleri
MKDLLWWLLTVVYAPDFEKWMRWCPVVCSRPLSYYSATDVHYPPLGSLLPALVWYIGTHTLGLSPHTWEFRVLWKVPAWLGAIMCIYLIRRAGVGNVGTLVVAASMAYPCVFWQLDTISMVPALATAVCEGKLAGLCAATALWMKPTAGIVALPFLRRQSIPTFLLASVLICGPYLIANGWDFVHDVIIFQVNRSPQNCSIWTLLPGCPGIEAAVGTLSVVVPLAMRGNPELAAGCIGLALLAFSKVVNPNYWAVGCPMVCLISWKQGAMVLSTAACFLTASAVSIVTTKEYYNAEDGRRYSIRELFIPPPPTTDLPVGNAAARYLLGTSILYHFLVTSCLYIRNLRKLAVSS

SEQ ID NO: 831 - protein, 335 aa, Methanopyrus kandleri
VKRVLLALAVALAVALVGGAEAKVYSGKYTIKPQIQSVEAPSEVQLEKGQTTADVTVTATITWTGNYPYTIKRTPTTVTFAVDGQTVDTKTINPPYKLGDTRTVSTTLKLTEGKHTITVTAKFPDLPQYGITGGTATQSVEVTVVAPKPAIPTHLAGAVVKDLLLAVPALMLLDPFMGYPLSDMLGYKTDLQNFLDDLGLREFAENDVGAVLPAMVLATDLLAGWGLDHNVMPNTLSMLDVGTMAGAVVAPLLYALGVGDVENPLVDLAQELGLEGSAVITEASAVGLALPTVSTVLGYLADKGVATAAQIVAPVVKALDQLLTMLASPIAGYLA

SEQ ID NO: 832 - protein, 326 aa, Methanopyrus kandleri
VAKIYGDEDASLEPLEDKTVAVIGYGSQGEAQAKNLRDSGIDVIIGVREGGPSWERAKKDGFEVLPIPEAAEAGDVVHILIPDEVQPQVYREHIHDNLEKGNALGFSHAYNIHYGLIEPPEYVDVILVAPKGPGHMVRKLYTEGFGTPALVAVHQDYTGEAMDLALAMAKAMGFTRAGVIKTTFREEVETDLFGEQVDLVGGVLYMILYAFETLVEAGYQPEVAYFETLHELKLIVDLIYEKGLSGMLDNVSNTAEYGGLTRGKRIINKEEMRKVLEEIRSGEFAREWTLENESGRIVMKRLREEIENHEIEKVGERLRKMMGFED

SEQ ID NO: 833 - protein, 94 aa, Methanopyrus kandleri
MPAPIEVGRICVKTAGREAGKYCVVVDIVDENFVIITGPKDVTGVKRRRCNIKHLEPTPEKVDIDRGASDEEVKEALEEAGLLDLMKEGIVSGS

SEQ ID NO: 834 - protein, 500 aa, Methanopyrus kandleri
LATVVMKRLIAVTLVAGLTILSFCGYESVAKAPTWKDAERALYHYGLCLVLSACSIRRVPGYSSVNILLHGYSGTSPSPVPLRWWLAWQTAKVIGLSILLSGFPALEVLKWILSGDPSRWVLAAAVLFGLVFKVRAFMSVLSQLAVTILDISEYRADKRLLQSALVSHGLRTISLLLVYLAVVLITYPVISLCLLPMIITLGWIAWYLHKMSRLPWKDHIQVCRVLKNRLRPVLVSSLLLCSVTFTLGLTTDYFTNVSVRIWEYVSGEHVRTVHTLVPAVLLDQTSLRRIAETHRADMSFLTLDVLRDRVVVLIGGESGQATAIDPRTGRSLGSQKLPPELRESSVEALTEDLEYAYPYLRAGLPVLYSGKLTVSGWVVADVWIPFAGYTLMIPEITLEVRGRGFKPTEAPAFPGVDWGITWYPARLDGRIVPVVIPSTVCFTSSIRVPGSLVIPLYGPTAVRVWLHQPCFIEIERDRVYVLKPEYYPDGILMKVEKIRV

SEQ ID NO: 835 - protein, 818 aa, Methanopyrus kandleri
VITVVFTGYKGGKLRFVLAEGDPEDGAEISIEGHLELSGGGEPVRGVLGGEPTPPDRVLSELQKADRKIALPDVAEVVDRVLGEKIEVKELCRRCLASDRVTVLKHGYRFGEVEVCGRCAREILEEELRFRVPGFSQTLLEKLERLLHELRDIDRVVEMVDPAFDPAEEEEKTRWEIVEAEDEEEHRLPLTELDIPEELRRVLERMGYQELTPVQTKCVERGLLEGRNLLVVSPTGSGKTLVAELAGLTEVLREGRKMVYLVPLVALANQKHREFMEKYGRPLGIGVRLQVGAARLKEFSGPERGPSPRDADIIVGTYEGFDLLLRTGAVDPDDIGVVVIDEVHTLADERGPRLDGLVCRLKTLTGAQLLGLSATVGNPEELAEYLDAEPIVHNRRPVPLEYHLVINQDRRQKWDRIARLVESEWETEYSTGYRGQTIVFTYSRRNTHRLADLLNERTGLDVAPYHAGLPYDRRRSIERAFERGELAAVVTTAALGAGVDFPASQVIFESLAMGIEWLTPREFQQMAGRAGRPGYHDRGKVVLMVEPGRRYHRSQSETEDKVAFTLLESEPEPVEVEYDDEDEREQVLAHLVSGAAKSPGELERVCDESLGFAGDPMRRVKELREMGFVKGLEPTEKGRVAARYFTGPRTVHELSARAGSDPLRAVASVRPFERFQLSPSIKRAVERVTRMSVPSRLDDALSVIHSERKEVIERLPPKEKQKLVSLMKELDCGCDAFPHCEHVSQRASELALKVRLEGKSVYAIPRILEGRYGITAYPIDIANWLEEVVRLLECAGEIAEEPEMAAAAEALADPWSER

SEQ ID NO: 836 - protein, 440 aa, Methanopyrus kandleri
VRRLVLPTLLTMVFLAVPATADTTATTPTAEVSTSTQGTLQQVTQQTTQQEQTPGASGELLPQVAPKALGYIAVGAILCAIPNRGTQELGADLTQLGAEALTLAAAVDHGLPLKYPVAYQFNRTYEKLSSPMYWGEVGFNIVAPMLVNSMLYSMLQPLSEQLEVPPDVIKNYIVQTCKLMAKLQDRPVSPEDVIPVIDSAIQIINQSSNQSSQSKLTEDTKYEVAKTIANFLNGIRGSSGVLIASNVCKFALRYINVEPSNGIKLWIGSVLSPVVPDVSGTISDVRNITRDINNAMIGVRIATNPVETIRQITEDTGNSIIETFRTIVKNADKLGISEETANEILDDLKSMISDLTSTITDEIVRPYEPIVRCLGIALAINSLMDAYNSFNRLTQRLSKLALIARGLGVQVPTLTNPEGELKRALGVLQQGRVGPPPLPF

SEQ ID NO: 837 - protein, 113 aa, Methanopyrus kandleri
LIDRLAKKYLTPEKVAELGFQITEELALRALNLIRNLRTEAKLEGDSYSFRVWDEKDRYEISASGEFRGSGFTLEFEKRVLDTRVRGHIEVEGEQVTELMRRLLEILKEGKES

SEQ ID NO: 838 - protein, 288 aa, Methanopyrus kandleri
MSGTQYRLIPVKSRYWKVGSGAVENALEALRGIELKDGDVLLLSEKAVAVAEGELIDERGYEPGVLARLLVILWMRVVWGRILGPLLGPLMDPPMRRETIENLRNYPLKDGSRHKQMILEEFGLLHALEPVSEAGCDVGNVPGYYAAPVPESADRVARELREELRRRRGVDVSVIVGDTDKTYEILGILFTTVARAHPDIVTGTGVIGFLVGRLLAKTVGPTPIAIAGDVSVREAIKLLDMAEDVRTKGAGRTVYDALEEVGDPESLDEEFLNGFEHVPIVIARPVTP

SEQ ID NO: 839 - protein, 185 aa, Methanopyrus kandleri
VEIQNIVASVDLKGEVNLDECSVILQGEYEPEQFPGLVYRLEDIGTVVLIFRSGKMVCTGAKNREQIYKSVERVREDLEKKCGVKFHGEPEVEIQNIVASIDFHVPLDLDTIAEVLVGDEDVEGIEYEPEQFPGLVLRLREPKVAMLLFYSGKAVCTGAKTEEEPEKAVKKIAEKIEKYGLKLTG

SEQ ID NO: 840 - protein, 358 aa, Methanopyrus kandleri
VPVLGLGHNPVPPVSGFTAGARVLLNRHRETVGGSTLTRVLGIQLGNTGTDYCVMNEDGDWEIVAREEGVFGKISCVFTLEESRRALREEIAPRVIERVRRVNPDLAVVGTIVDELGLILGPMIHEKTGVPTLAVYGDPWGAPDGDAVGAPYCVAEEYPNCVHVDVGAMAVVTPIRDGRPDFGDAVVSVGTFPLDLAARELLGKEYDEGGKKAAEGEVDENFRRELRSVDVDGKPVFGRVRGSLAPVPPEQERVLRDHIRDAGAPAEDVLRTLVELVAETIVINAAQYDMDLLVLSGGGVKNELLKRRVSELWEGDVSIFAGEELEARGLCLLGLRYLEGEPVPALPCEGGTGRGGKT

SEQ ID NO: 841 - protein, 159 aa, Methanopyrus kandleri
MPKTKHWHYSIPPEELDDERTAKAFIRELRISPKHAREICRAIRGMPLDRAKEFLRRVIRKEEAVPFRKHKKKVPHRRQIRPGWDAGRFPEKAAREILRVLEHAEANAEYKGLDTDRLYIKHIAAHKGRVIRGWIPRAFGRATPFNTPTTHIEVILEER

SEQ ID NO: 842 - protein, 227 aa, Methanopyrus kandleri
MVMYGENVPVHKKFVQYGMLKTELDEYLEEELGRAGYGGMRLQRVPNATKIIAYVERPAIAIGRRGRNIRRVEEEVQERFPLLGRVSIEVKELPSPELNPRVVARRLASALERGIHFRRAAYGALRRIMNAGAKGAMIILSGKLIGARARTEKFMEGAVKYCGEPGDEYMIEGYVQAVTKPGAIGVTVRIMPPDVELPDELEIRPPEEVEDELKELIGKSEDEAEGA

SEQ ID NO: 843 - protein, 77 aa, Methanopyrus kandleri
LGKFKLRPDEIREMTPEERREKLKELKAELLREMTSKSISGVPDNPGRVKEIKKNIARILTTEREEELRKIRETEKG

SEQ ID NO: 844 - protein, 106 aa, Methanopyrus kandleri
MQEDDICPVCGLPKELCVCEEVSKETVEKIKIYTEQVRPGKVVTIIEGLDDAGIDLQELASKLKRECACGGTAKEGKIILQGDHRNKVREFLIKKEGFSEDAIEVT

SEQ ID NO: 845 - protein, 229 aa, Methanopyrus kandleri
LELRYRTPSGMSCLYLPRCAFPRSGRDAWRKKKQVETILTLLCSRLKPGDTVVDCGCGRGTLTTALAVSSPSCDVLGFDIKEFETWTELERYVESVGLDNLEFEVNDLHETAKYGLPDDPDVIVGLHLCGTLTDRLLKLAVNSDAHFVLVVPCCYGRASPRVIVEELGVDEGIERVREVLKRAESSVEYQLEVCRMRGKFLEEHGYQVHVGVAFPEEISGRRVFLMGIT

SEQ ID NO: 846 - protein, 108 aa, Methanopyrus kandleri
MRPDRTSETHTSVNTDSSYRRGFDTLTPSPLPPPPDPEELVGKKFRVVRANSRTYLGISGRVVGFTKNCLVYDDGGGDQKILPLRHIVMEVEGLRVDGRTLLRLLQEL

SEQ ID NO: 847 - protein, 245 aa, Methanopyrus kandleri
LIIPLVVGGVLALLVLAASVRIVNQYERGVLLRLGRYIGTREPGLNFIVPFIDKMIKVDLRVVTQNIPAQEVITKDNVPIKVDAVIYYRVVDPVSAVLNVEDYEEAVFNLAQTTLRSVLGEVDLDDILAKREELSERIREIIDEKTEGWGIHVTGVEIRDVILPEEMRRAIARQAEAERDRRARVIQAEAEKQAAQDLRKASEVLGVNPGLLRTLQTLSEVSAEENVTIVIPVPIELLKLLKEPE

SEQ ID NO: 848 - protein, 142 aa, Methanopyrus kandleri
VDTLSQELCLLLAGVGLIVLDCVLNTGIVAMIGVVCAWVGAYLMGTKYLIATLPPGAFVLLMQVAAVLRRTEESSDVLLKSVGELKGEEGIVIREDPLLVKVRGEPWRAVSKTRLRRGERVVVLDVKGNKLVVKRRKTGERR

SEQ ID NO: 849 - protein, 434 aa, Methanopyrus kandleri
VDVVIGAGPAGRTYAMILAEAGHEVLLLDRNGKEGTGGKCLNEACVVLGALIEAARLVVWAKLGIPGVELDVGDINFRRLTRSVRKVVETIRQRLIKETERAGVEILRAEAVKVDESLNVYTKDGDVLEADRVLIATGSRPAIPEVEGVDSDAVFTFREILEMEVPSELCVVGGGPTALESAFAFAALGSEVVLAYRSRILPNAPEEVRREILKDLELVGVNAVRAGELRAIRETSSGVECRFERGATVADAVLLATGLEPNSDIAANSGLPLRKDGSVVVDDGMRTPRDGVYAAGDVTGPPYLTPVARYEGTVAALNALGKNVRRGNPPAPRVIRLFRDFGRLELRGIDWEGSLPTPVGGPAFWMLHHGIKGKMVCRKRGVTTEAFIVAPRIAPMLPYPRCVEPDWRLIEVHPTPDPVIGLLKQLGLRRTLGE

SEQ ID NO: 850 - protein, 668 aa, Methanopyrus kandleri
LGKVLVTTALAYTNGPLHIGHVRSTYLPADVYTRFLKMRGIDAIHIGGTDNHGVPIALQAELEGKDPEEIVEKYHEMIKEDLERLNIHFDEFSCTCREFNPDHVDMTQWFFKRLYEAGYIEEREVEQLYCPECERPLPDRYVEGVCPYCGAEGARGDHCEACGRYLEPVQLEEPRCVICGSKPEVRRTMHLFFKLSEFEEDLKKWLESNDNLPKNVRNYAIQWVREGLKDWDIVRDLDWGVPVPLEGYEDKVFYVWFDAPIGYVTFTKQYCDRVGQDWKDYWFSEDTKIVHFIGKDIIVHHALFWPAMLMGVGATLPYTIVAGEYLTLEGEKMSTSRGWVVWVKDFTKLFPADLLRYYLIVVSPLTRDADFSWGDFRDRVNNELVANLGNFVYRTLSFIYRFLDGNVPEAETDQEIVDKIKETHQRVTEHLEKFRFREALTEVLRLSKFGNEYFQEHEPWKLKDEDPERCAEVLRGCARIVKALAVMLAPFLPDSAEKIWQSLGYEDSVHDVDWEEALEDVETKEIPEPEPIFPKVTEEDLEKAKALLPEESGESEGQDDEYVSLEEFNRLDLRVGKIKEAERVEGSDRLIKLRIDIGDRTVTAVAGLYPTYEPEELVGRKVVVLANIQPKEMFGVRSEAMILAVGDEPALLTIDESKREVEPGERIR

SEQ ID NO: 851 - protein, 444 aa, Methanopyrus kandleri
VCFTLAAVVLISDSEIKWRIHDALYPMILGSTEAKDVMLLLHLGLLFLVLPYRSRIPLPKIDTWVTYALMAAILAVPPALQLLMIYEAGFNPGLGTCIVTLTERPETSSFYHCHAVKACLGALISAIFGEPKIEFHCGVPLSFVLPPWVPLPVLALLAIAYVVLAWIVPLRADRTEKAIVLSIAGSLLCLGCLDGGPLANPSVVGLSILLASRIRTVAPPIASLGVLGGLDAFRQVLFYLPAYHTLTYLWTAFLSSLLPSTVDRITRRSTLAVSLCLLGMLVPHLPVAEPLRSTLGLASEHDYYRVDVSNGDPAEVRAELSRIPGVEAVSIRVTDGRVTACVKTKRGVKLQVPKARVRKIRGYILELRVLYGSPRDLTEALKSTDGVVGVLGVKKMGSVYRVELGAEVDREVNLVPSMVKQLRRHGVVVSRIVTFTDVARCIWG

SEQ ID NO: 852 - protein, 204 aa, Methanopyrus kandleri
LRTKIVAVLLISAIFIGALMGVITYQWSISSKGARVGCYHVAITNVKGSVEPGDVKRALLKCPYVIRVGGIRTAPSSCDAYIIVKAPTPVSKYDIAQELSQALRKAGLGKAPAVFLNSVNAYVVEVAVEDPKIPASVAARKVASAPTILAIFKVERRGSVYVFEVASLEEEYPVAYSVTGALKLAGLKPVGVANVTPVKWGYVL

SEQ ID NO: 853 - protein, 215 aa, Methanopyrus kandleri
LILCLALLILTSPYLAQMILQYNTPYGLKAGTLVVVSGGSSVGETSSLTHTHSLKACVGKVMNYVIGPIPTKYHYGSVLSKFMPTWAAVIFTAAVIASYVILAILSPLAVFHERGSAAESLLLSWAGFLVVLGAVDGGFMCKPMVIGLGMLIVWALGPLPVRRYVIIAVLIGLTPMLLQATIRVVWYLTSPLAPNSVVWAVALLLMTAIARGQGW

SEQ ID NO: 854 - protein, 323 aa, Methanopyrus kandleri
MKAFSLVEPSPAKNLLPVWERLLEEGWEVTVYGHGRGVEILKWEGIETKQLGKPRRRQGLLGYVGFSVDLIRTVRALASERASVVLSSGNTGDARKSLIASRMLGIPSVHLEMDVYNPVEAVRWATRVLVPFSEKWAEVLKRRVGVETKVVSGAPLAQYLADRHLSGRIPGPVPEEYEGRVLVCLGGDITEEGARRLLSDLEDHDPVVVPFRVSPPEGFECVREFVDLPGVMMLADTVVFAGGFGVTIEACVVAKKAVKVSEVHPKHLSHWIAEESGVPVMYLSESSGAEDAVQMARKPRGEWLIRRGRSAVAEIVEEILEVG

SEQ ID NO: 855 - protein, 201 aa, Methanopyrus kandleri
VNSVRTADVKRTTKETEVEVSVNLDGSGRAKVDTGLPFFDHLLHQFAFHGRIDVEIKARGDLEVDDHHTVEDVGICLGKALNEALGDREGIRRIAWALVPMDEALVECAVDISGRPYFVLKGYRPRRNRIGSPPLSTENVSHFWKSFCDHAGVTMHVVVRWWDNDHHAIEAMFKAVGRALGAAKEIVGDGVPSTKGTLRRG

SEQ ID NO: 856 - protein, 114 aa, Methanopyrus kandleri
MERTVSIVCIVLGAALLWMSSGASHQVVGARELQSTDDGTLVRVKGEVLQVNVVSDGAEVVVLDAGDGTVTVFLSREAASTLAPTPGESLEVVGRVEEYRGRKEVRVDSPVRAR

SEQ ID NO: 857 - protein, 271 aa, Methanopyrus kandleri
VWIRRYVPAKALIVVIITTLTVPYFVFYGKPRGPGYPTELYGYRIVLEDPALAVVDVEPRRTLLFRHTLTVSDEGWSVHPVFDIPPLIFVRAERMDTLETVKRNLWAVVLQEGAGRVFMPDEFVEGGVPGLITGIAGQAWAWKHLKWAREFGVIHGLRRYAKEVGPERISTAILEEYRRAPWRAILDFCDMMKNSDVGRFLRSRGLSFRDFLTSKDPKLVAEVLVVLDLGRLDERVVDERIRYVLDARAYPIPESEEKIVDKAARELLRHG

SEQ ID NO: 858 - protein, 307 aa, Methanopyrus kandleri
MAASERNTGKFTEECPACGSAEIVFDEERGEYVCANCGLVTEDPVIDPGPEWRHFNPDQRQRRSRTGEPVKLRLPDKGISTIIDRELRDSGGKKNPRMRRIRTWDARIKVSGSRERNFFQAFLELENLASKLQLPESVRELAASIYRKAYKEGIVRGRGIESVLGAAVFAACKEARVPRTAREIAEALGVSDENEILRAYRVLQRRLNLKQKPTEPSDHLPRFASKLGVSENVQAKAQEIIEKAKEKGITVGKGPAGVAAAALYIASILEGERRTQKEIAEVARVTEVTIRNRYKEICEALGIELHP

SEQ ID NO: 859 - protein, 94 aa, Methanopyrus kandleri
MRRLGRALHVTPRGNLIARADHVPPLGAPVVTRRRERVGVIVDVFGPADKPYVAIRDKSRHHLERFVGKELFIPPRRRRRRPPRRRRGRPRRRR

SEQ ID NO: 860 - protein, 200 aa, Methanopyrus kandleri
LPCRTHALKLRPTCHPPHRTLRSRRRHPLEPVRPTPILPGGASVQVVRRIEIDRTRCEGASCALCVEVCERGVLKIKGEEVVIADLEACDACDECVRVCPNDAIDLYRYRERQFLSAMVRAMHGDGDGLEVARRVVMRGRDVFGDTWFYLRRELERTCRIKREAELEGKRAKLYECTCKVCGKKFKSNKKLDVCSECANR

SEQ ID NO: 861 - protein, 94 aa, Methanopyrus kandleri
LNRQDPIEKTKELFIKVSRILGEEQPEISVRREEDPSGHILNPWVANSEGADDVWPLVFEVRSKDGVAREFTLLVPVRLERRRLREILLKVFRS

SEQ ID NO: 862 - protein, 311 aa, Methanopyrus kandleri
LYPRGREATLAAVLHTILRDRPSTQKEIAEKVGVSRRYVTELLRPLIEEGAVRRTYTVDMSKLRRHFPELFEELGNFLYEDVEMHLEGVRPYFKRMTDLTLEQIETALIAVEENPEQAPKVIEMDEEVNRLDEEIRLYVRTLPVLHPCEEAGKVATLLLEISHCIERIGDYACNIAEVAETLGTLSDLQCWREVREAALEARSMVKTAYSIFLGRVKEEDLRHEAEKVYCAEDRVHKNIIRACEKAVEETKEFPEKADRLFGLSRITKDIERIADKAVDVVDFTRELVEGRPRDLTPEQEMRSTLPADGTH

SEQ ID NO: 863 - protein, 238 aa, Methanopyrus kandleri
LYYIGLGGFGCRFSTHASNAGLEVILCAGSRGDLLRVSEGEKIEVASGIGFSRDWRKASEELQEQAETIRETLERVGAEEPTVLAFGLGGAVGYALAQQILKEPPVPFIVLTTVPGESEDPQVRRNAAEQVKSVLGVSIKLPVLWVDNALGGYERVNRVLERTLLDLRDFLGVPVEELPNLAGNYALSPSISGEKVTGDVVKTSADEVRKLVKSREPEEHVVRRERRGPDPESLRELF

SEQ ID NO: 864 - protein, 78 aa, Methanopyrus kandleri
MARKARVTLTLSEDALARVLATKDALEGDSISATVGKLVKFGFAYLREKFPELFEGINLEEYREKARERWFDSGSSRS

SEQ ID NO: 865 - protein, 387 aa, Methanopyrus kandleri
LRAPEGFLLGGIKREGIGVGLIFSERRCAVAGTFTENTLRAAPVEHSEEVCDRGVARGVIVNSGHANAMTGEEGYQDVLRTAEAIAELMGAPEDEIVVCSTGVIGERPPVDKIVRYAREVWEDIGPTERHVREFSRAIMTTDTEEKIALYEGDGWSLLGIAKGAGMIHPNMSTMLAFLLTDVGAKPKELQMWLRDVVNDTFNMITVDGDESTNDSVVLLANGSSNLKVGSDVTITEFQRALEEVCTELAEKIVRDGEGATKLMIVCVHGASNEVEARRAARAIASSNLVKAALFGENPNWGRIGAAVGAARVDVDPDELRIAFRSSEGEIVTYEGGPVDFDEEKAKRVLSASEVEIVVDLGVGDASARAWGCDLTYEYVRINAEYRT

SEQ ID NO: 866 - protein, 412 aa, Methanopyrus kandleri
LTDREEVVELRGHIIDSLIFSRVLDTIMEMGGDFEILEFKVGKRKTDPSFAKILVKGKDPEHLREIVSELRKYGAVPVHTQEVRLEPAPADGVCPRGFYTTTNHRTFVLFDGEWIEVEDIEMDCAIVVYPEERRAVAKPIREVREGELVVVGDRGVRVKPPERPRGRTGIFGFMESEVSPEKPTPTLIRRIAEELEWHRKNGKIVVVVGPAVIHAGARDDLAWMIREGYVDVLFAGNAVATHDVEASLFGTSLGVDLETGEPVKGGHSHHLYAINEIRRVGGLREAVEKGILKDGIMYECIVNDVPYVLAGSIRDDGPIPDVITDVMEAQAEMRRHLKGATLVLMMATMLHSIATGNLLPSWVKTICVDINPAVVTKLMDRGTAQALGIVSDVGVFLPELVKELKRVRDDEA

SEQ ID NO: 867 - protein, 84 aa, Methanopyrus kandleri
VSERDTKKYDMIIPLGVPADVIAEVERRCDVKVVQREIERGGTKTTVLAFRGTKDALEEAKKVMEELIERRVEEWTKPRRRGPS

SEQ ID NO: 868 - protein, 327 aa, Methanopyrus kandleri
LSEKSSRKERDEKTEKETARQGKHRRIRVKSRHYEMPFSRGVLARSLTAIGVEPHKAYEIALKIKEELQDEGIEEISTDELADIIRTKLEEIDETLAERYELWRRIKKREEPIIVLIGGASGVGTSTIASEVGHRLGITNVIGTDAIREVMRRVLAEELYPTLYESSYTAWKRLRYEPAEDPVITGFLDHSEPVVVGIEGVVNRSINEGIHVIVEGVHIVPRLIKKEILNYPNVFVFMLAVEDEEAHKWRFYARSRDTKLSRPAERYLKYFEEIRRIHDFLVEDAEEHDIPVINNEHIDETVDQIVSYISSKLLKGERELSKSVSWW

SEQ ID NO: 869 - protein, 138 aa, Methanopyrus kandleri
LTFREKLRGCKVEELMTKDPITASPQVGVIEAFEIMLKHDVGALPVVDDEGRLIGLVTRTDLGRALLEDEYEPGTTVEEVMERDVVVVHPDDTLLEALKRMTSAPEGIYNQLPVVDDEEKLVGILTDGDILRWIAKKL

SEQ ID NO: 870 - protein, 294 aa, Methanopyrus kandleri
LFGWIRRHRKSIVTAGIIFLAAMMVLSAIPSFMMGGQSAVAAAEGTVDASIVKDYQVSVVRYLAVPKPGVKTSDVKSAVSSAGGVENVDVRKVKIKGYTVFVVDALVPLTADPEDVKKRIEERLKDKVLDARGTVIKGSKFVFQASYDGKPDVNAIKRAIRRELGNRLMDGPKLKVRYNAVVGEVLCNVSDGKHTLIEERIERALHSTGARGCLVIEQLIARLGTAKLTLLGPGKEKVGDRTVNFGDRMAMVLVLPEHAKSKHLTLALWISNSGGKQRIYVVDRDILRGKYIVF

SEQ ID NO: 871 - protein, 181 aa, Methanopyrus kandleri
VYEVEVKVKLKNPEDVRKRLEELGEKVRTVRQRDLYYQHPCRDFAETDEALRLRCSDDKVALTYKGPKVGREKSRVELEVVVDDFETTDAILRHLGFEPLEHAEVKKLRTVYTLEVNGEKVVAALDEVEGLGTFLELECKADDESEVDEKEKLLVSILEELRVEGKRVRHSYLEMLLDQGE

SEQ ID NO: 872 - protein, 380 aa, Methanopyrus kandleri
LPSTGALIHVARWTVLAAALGVVGGACAVAISSIISTVEKAVGNEPLVIPAFMLLAGSLAALHPELRGTGMEIIVRGFPNEPANPIRGMAKLVLAGLVIGGGGSGGQVGPCAQACASVGGYVASKLGMSEMERKWAVLGVISGGVAGVLCAPLAAALFAIEVLRVRSRYVVLFPSTIASLAGYSVYVSTLGKRYLLVRNAPYHYSPQHLPELLVIAVVATLLAYVYSRCVKEARRLFVESVPSQPVRSLLAGLGVASVGIAIPTAVGLGLDYASKAALGRIGAEEALLSFLGKMVATALTVGSETPAGLVSPTVCVGAFLGLFWVKRWARPLRPEPRRLSLRSWLRRSTLRSRPLCWSSSCSASTAPSRPLWERSWGISS

SEQ ID NO: 873 - protein, 103 aa, Methanopyrus kandleri
LTVSAEGERGPCGRVRELYSNDKVSVAEVSVRGEGEEHYHRRTFEVYYVIDGRGKVVLNGRPVDVGPGDVVAIEPGTRHKVIGNLRMLVVCIPPFDPEDVYRV

SEQ ID NO: 874 - protein, 238 aa, Methanopyrus kandleri
VQPLTRRNKDEHPAVLDPDRTIVLGDVTVSRDAVIGPEVRLGPDAVVRGAVISGRCVVYNCELGRCAVGPKTTVTGDVGDGVTIHSGTILGQLRVSGEIEPPEVGEGAFLGPGVSVLPGTVIGPESVVMPDSVVTERVPRRGVVSGNPAMPTGMVVDAETLILEFDGKRLLLEGKRGTAFDVRLSDGELEITEESPDNFGAVLEKDVVKVVRMGHAIPLPAERPFSIPLHVLEVRTKG

SEQ ID NO: 875 - protein, 200 aa, Methanopyrus kandleri
VPVRESLLIDTDVRRSLVLGSVLEMCEVERAAVLGTVAQGKRFEHGVFVAGKRVPGEVITVEVEVSREVVRSGSMEIDLDPADPDLVAVVADVRATGLIANLTGLRPERRGFHALFAFSGELPARVRKRVVSNLDVFRECCPCALLEIGDVKLRFLGGRQVFDERSRLSYTDVLAVRDGKPIASAWRPASRSVISKLGAR

SEQ ID NO: 876 - protein, 308 aa, Methanopyrus kandleri
VVGTVRELPTLFCESVALEVLSGPKPGLVDPISPSSHEDMGPREFLACLPELRRCLEEALELGIDGEPVDELIRSLPAWNVDVITASGGPNSVRGIVFLGSVYCYSAGLENDPFPFGRIRVVGRRCTEALWNRSETKCGRIRIKERLAGVFGEVASGMATARGVSLPVLRATLRAGRPLEEAVIHSVLACMSTLEDAGIPRKLRNWVKRRASEVLRAGGPFTERGRAELHKFVHECAERGVSPGASADVTVVGLVLLLARWGRDIVSPYRDPPRRWSGGAVERNSQASDTVGRNPGGRVRGRREVLKG

SEQ ID NO: 877 - protein, 167 aa, Methanopyrus kandleri
LIRSDGTRAVASAGDEKFLKADEAEVRRELTPFEAYRKICKKLDASVVEPPEDVGHPVDPEVGYRVLELLESLWDSGFRRLGVLGTVGCGAPLHDIEVGNPVGWTSVRVSNPGSDLDLVAPHRDYLLEMSLSGFETVKRFADRVIMSPAAFTGFTVPRVEVRLPRGC

SEQ ID NO: 878 - protein, 436 aa, Methanopyrus kandleri
MEETGVKDVRDLCEKFLDFKREKERLEELLKEYFKRLEELERKLRAHEEKLRIEARRRKTLEKELEMERDEKAELREELRRKEVMIEKLRSDLQRMKKPPLIVGTVEEILDDGRVIVKSSTGPKFVSNVSPTVDRNELEPGANVALNQQSMAVVDVLPSEKDSRVLAMEVDESPDVSYDDIGGLDEQIREIREVVEKPLKEPELFEKVGVEPPKGVLLYGPPGTGKTLLAKAVANHADATFIRLAAPELVQKFIGEGARLVRELFELAREKAPSIIFIDEIDAIGARRMRDATSGDREVQRTLTQLLAEMDGFDPLDDIKVIAATNRKDILDPALLRPGRFDRHIKIPLPDEEGRYEIFKIHTRDMNLAEDVDLQKLAKITEGASGADIKAICTEAGMMAIREDRDIVTMDDFLKAVDRVMGKKEEESGEFKRAYH

SEQ ID NO: 879 - protein, 265 aa, Methanopyrus kandleri
VGERTVAHYGPYVVKEIRTNQDNLDAIRSLLKSAERRGPGNVGEVVPLDVFDTDRGLASDRTRLLVALREDEIVACVAADPRERIGSGPNPHNVFGLVVSPEVRARYQLGHVMIAAALKTLREEGLKVARTTPIRRALPFFTGIRADPTHVYRELEVRLRWYRRTGSEEYLELTRVPREVREELELLRIRTVNARRDPTPFHRLDPEKPVHVFRSGVRSFTLIASLGDGDHGRRQRDIAHVQRAREPSKGDSQDRGGSGGRRLDR

SEQ ID NO: 880 - protein, 240 aa, Methanopyrus kandleri
MVDVSVILPTYNERENLPRVIPKIEEVVEEEGWTAEILVVDDNSPDGTAEVARELSRQYGNIKVIVREEKPGLGLAYRRGFREARGEVIVCMDADGQHPPECLPNIVNPVLDGECDFGLGSRYVEGSVVENFPWYRKLNSWGARVVARLFLKLPYRDPTSGFRAISRKILTESRPFVSEGFEIQVETLAKAHHMGYTVQEYPFLFRPRERGSSNVNIRQILRYLRGVWRIRKDLKQRGLL

SEQ ID NO: 881 - protein, 446 aa, Methanopyrus kandleri
LRVVVVGGGAAGVVAARTAREHGADVVLISADEHIAYSPCAIPFVISGEIERPEDILMRDPTHYERLGIDVRLGVRVEEVDPEEKVVTTEDGDTVEYDSMVLATGGEPLVPPIEGSELDGVFTVRRFSDIEPLLRAVQESERAVIVGAGPIGVEMAYALHERGLEVTLVEMLDRVLPQFLDDDVAAIVQERMEKEGVRVLLGSPVEAIEGDDRVEAVVVNGEEIEADLVVMAAGVRPVTDLFESIGASVLPFGVEVDPALRVKREDGGVFDDIYAAGDCVADWCPITGERVPSQLGTVAVRQGKIAGKNAAGGPRATWMGTLNTAVIRVFDLEAAGAGLTQTRAEELGLEVVSATVETTTRARYYPGGEPIAVKLIADADTHRIVGVQSVGGERVRERVDGVALAIRLAAKVEDLLSWDYSYSPPVARVIEPIYEAAELLREELHS

SEQ ID NO: 882 - protein, 171 aa, Methanopyrus kandleri
MKRFLRDLSAATASLTALVLMESFTGITLESLKHRWVHHPEFLAMLPALMDFRGNVALAHSARTATATHLGDEERALQSSLAVLLIGLMVPPVIGSVVYYAYGGDLSTLVGTAFLTVLSVTAVVTPVTVGIVRMAAMLGFDPDHVAPPLTTALSDVLTVAFLFTIAEVMVG

SEQ ID NO: 883 - protein, 173 aa, Methanopyrus kandleri
LSSVWRGILRILRSMLVISIILAVWSSFTGSLLAKWEAKLEHNPGLAALLPVLMAAAGAAAASFGSRLSTYLHLGTFTIWAVLRDALVQGSALLLVIAGYAGLVTVAFSGRPSLILLAVESTGLTFLTSILVALGSAFTSVRLGMDPDDVVGPVVTTAADSVGIILTLTLAPG

SEQ ID NO: 884 - protein, 196 aa, Methanopyrus kandleri
MEKIEEEVKKRTVVELLTEMKNLAQLSVDLAYSVLLFGSPELAEEVRRIERRVDELSMVLKAKLALAIRDLEDVRHLLPIMELTQSMEVITDAANDIAETVAMGAEPHPIVQKAIAESEEKIRLVRVEEGSELDGKTLGELRLASETGMHVIAIRRGSTWIIGPDKDAKILGGDVLIVRGRDEGYRKLKKMASGRG

SEQ ID NO: 885 - protein, 98 aa, Methanopyrus kandleri
MRWETRREKIVSLLTESREPLTIEEIAYMVGEDDKSKIIEDLEHIAKTLRREGKTLLMEPARCNKCGYVFKSLRVKPPSRCPKCKSEWIQPPRFTIRE

SEQ ID NO: 886 - protein, 218 aa, Methanopyrus kandleri
MKLPENVPEPPVVCEKFDIGEEARVMRRSHDGYVRLGEVAGLEKFRSVCLVSVRADSGYYYVVPYRVTEERVITEPLRVRKIGEGVVVPPIIPHRRLGELFVDVRKVGSDYMVTLYGKNLHVRTYESLTIMTQRRGSELSAGGMSIDLSSGFLKVEGVRCRPLGFHRPDAIVGITERLEVVEIRENGSRYLGDVVAVGEFLRITLDDLSLDVPRRVIP

SEQ ID NO: 887 - protein, 254 aa, Methanopyrus kandleri
LLKVTVCPPCYGFREVCHKLAQDGEIVDVSDARRLSDITSLCDEGADRVVIAHMDAPTVLEWLERRDRYALRSIRSKVYNVLSALLNRFKEVHVVVYSQVFLDFVPDSIVREVSVELVKVEGSAKDILTWPPYGPCPEALKRGGTLEEMNEHVSELVEETGSTILGEIARRDVRVVRTMYLSATEILGRICRNFREFKLGTKMLDALEAAGVLTSRNVGYRMFSWSPAAVLGRRSELVNGVLNAVLEMEGAVFG

SEQ ID NO: 888 - protein, 256 aa, Methanopyrus kandleri
MRVALRVAYDGSRYHGFQYQPDVPTIEGALRKALSELGLELVGYASRTDAGAHARYQVVVVEGDPELAQPDPINARLPKDIRVIAKTEVHEEFDPRRDALRKEYRYFLGPLNRPEAAARAARKLEGKHDFSAFRREDGRNPIITVERCELVEITPNAYVLRVVAPRFLWEMVRRIAGFVWEVGHGLREEGDAEALLSGKFEPSKKPRCLPAEGLILWHIEYDEVRFERTKAWFEDHKVIQLGGRLLLRLPEGAESC

SEQ ID NO: 889 - protein, 301 aa, Methanopyrus kandleri
VSLEKVDLERLLEHIEETNFCRRLFREVSEEWKTIIGPLQGDDATVIEVNGERLVINMEGPYPAKIGRKTAIIHSAADVVVTGGEPIVAFDAVQAESEEQAEEILEDLRKQAEGLGIKILGGNTQSHPDLVPCVSVVVIGRLIADEPIPDGTAREGDALVFLGEPVRGDVGDRVYKAKVKFNAFLRFLREGIDVSAAKDASRGGVLGNLLEMMGKAKKGVELRSMPYPTWTGYLGIFMVCMDPNDVERAAEIAFEEGCPFTVAGEVVDEPVIRFGNRELVSEEEMIEVYRRLPYKPPGAGR

SEQ ID NO: 890 - protein, 393 aa, Methanopyrus kandleri
VGRTCSGGAFLGIFSGMLSGYIPGLHPNTFFSEFDPTYLDREDVLTFASACSAVNVPLSKVESMFLGVPDDQASVAVLIPLQRYTIEGRAEEAARLVALGTLSTGFFAAVALPYIVKIVGPMYVASKPIIPWLVLTILALQTYDNGLRGLAVFSASSAVGYVVLSGPLDVASPLEAMLSGFYAIGPGLSCLMNRTSIPKQRPGKPAISGKELPKCGILAALAGCALGFLPGLGPANVVSVLTRLGVDTTERYLLVTSGIDAADAVSSIVALHALGNPRSGASVFIQRSVGDITYPEVLASVGVYLLVSVLGAWLLIFSTRVLGGVLSGARARVLTGTVVLGLLALMTFHGLGSLGTAIACAGIGIYALRSGVDPSLCTSALALPTALKLLGVG

SEQ ID NO: 891 - protein, 182 aa, Methanopyrus kandleri
MLKELWRSFAMALGAAWTLGLLALTVHILGLVWTIVLLLGISVLLGISVSRRVSPFIAVARGLGLLSLLMVNAARLEYLAPWLAMPVLGALYVFDRPAFYLVIAAAGAVLLLRALIEIHEAAVEADFRYRSKVQGLALAVREIWSGIMEALERLSTISAEKKEELSGTFTVAGKKLLRWMLS

SEQ ID NO: 892 - protein, 425 aa, Methanopyrus kandleri
MIGIVLAAGEGTRMRPLTKTRPKVLLPVADRRLIDFSIEAMKRIGVEHLVVVVEYLAEKVERYVKDRWGDSFELEFVRQGKPLGTAHAVYVAWREIEPDETVVITNGDLVFDSELLERAVREHEGVASMVLVEVEDPSEFGVARLQDGYVVELVEKPKPEEAPSNLANAGVYVAEPEFERFLERVKPSPRGEFEITDALLDAAIDEGVLGISYDGFWSDVGRPWDLLDANAWALRNAMSRPEVEGVIEENVELRGPVWVAEDAILRSGAVVEGPAYIGPGCEIGPNCYIRPATTLVRDVRIGQAVEIKNSIIMEGTNVSHLSYVGDSVIGAKCNLGAGTIIANLRHDERNVKVVVKGELEDTGRRKFGAVLGDGVKTGINTSILPGRKLGPYSATAPSTVVRKNVPEGKMLVQGDQILVDWEGRG

SEQ ID NO: 893 - protein, 452 aa, Methanopyrus kandleri
VGKYFGTSGIRGRVGEFLTPELALRAGRALGEYLGGGTVAVGRDTRVHCDALRAAVISGLTAQGCDVVDIGVVCTPTLGCYVATEGLDAGVMITASHNPPEYNGIKFWDSDGMAFSPEQEREIEQIMDGDLEYPNWDEYGEVVDDETALNVHVERILDEVSVDGDGLRIVVDCANGPSAFVTPVVLREMGCEVISLNAHPDGHFPGREPEPKPENLKDLMRTVRATDADLGIAHDGDADRVVFVTEEGKFAGYDEVLALVCRRILEEKGPGKVAVNVDASMVIDEVVREMGGEVVRTKVGDVHVAAAIREEGCVFGGEPNGTWIHPDVHMCPDGPLSAAWMVSLLIEEGRPLSELLAEIPSYPVVRETVECPDELKPEVMRLVETRLREAYDDIDTVDGVRVELDDGWVLVRPSGTEPLIRITVEAESEERARELRDEFVDIVRRCVEEVRE

SEQ ID NO: 894 - protein, 268 aa, Methanopyrus kandleri
LFAFLLAGDNVELALMELKGALRAEVGEIEVEVHDRVAVVEGLTDEEAERVVRRLARTHAVYRVGEGRVRVEIGGERRPVRLLAEREKLSDRKPHKRPEFMPDSTEPFLARVLVNLAEARRGERLLDPMCNVGGILIEAGLIGCVPVGVEVREELVERTERNLRHYRIEEYELHTGRAEEVDEILDEPVQAAAVDPPYGRSSYIEGGPVERLLLNTLDALSEVVEGKVSLTAPVDAWEEVKESVKRVEGEVRDRVHGSLTRVIAVVVP

SEQ ID NO: 895 - protein, 457 aa, Methanopyrus kandleri
VKVLLVQPPFEDDIARVLGVRGFPIGLVYLAAKLEKEGFSVDILDCPAEGVEMEDLRGRIRGYDAVGITATTPVAPSAYKVAKLAKDEGAFVFLGGPHPTFMDREALRESPADVVIRGEGESTTVEVLEAVDRWEESDLSNIPGITYREGSKIVRNPDRQEPEDLDSLPLPAYDKVDLDQYSADSVRFVPVITSRGCPFRCLFCASSRIFGPKWRGKSPDRVVEEISYLVEELGVERLEFVDDVFTAHKRRVREICEKMREEGIDVPWDCGARADTLTPELARTIREHGCRTVYVGAESASNETLKRINKGITVQDVIACRKVAKRHGLRILLSFILGFPWEDREDVFRTIKFARRLEPDYVQFTVCTPYPGTPLYDLAKERGLIEVHDWSKYTTVDPVMRTEHLSTRELGRLLQRAYLSFYLNPRYLLNALREGKLFLFKRIVKSGIRAVLSYLSR

SEQ ID NO: 896 - protein, 468 aa, Methanopyrus kandleri
MTRVGEFIRVLNRVLDSELARRLMKLGAKRCESCGDVRVKVALDVAYGGREDACWKCKATARLVKKLVEKTARAAGVDEETVREALSLDSYRRGIAVTLLGIYRYGVRKPFVPAAPYLVVWDVTGLCNLRCEHCYSEAGKPAPGELDTERALEVIERFSEWNVPGLAFSGGEPLMRDDFFELAEASANEGMFTALATNGTLIDRDTAERLEAAGVEYVEISLDGARPETHDKFRGVKGAWERTVEGVRHCAETDMITVIAFTVHRNNVDELPQMLDLAEELGADGIAVFNFIPTGQGRFCPELDPPPEVREEVLKMLVREALDRDLMIYSTAPQMSRVSLQMTESGEGGVLYGTHFAYAGEGRWIEPLVEFIGGCGAGRCLLAIRPNGDVQPCVFLPVKIGNILEDDPEELWEHEVLWACRNRDELEKPCGECKYRYVCGGCRARAYAITGKVEGPDPGCVLVGDANK

SEQ ID NO: 897 - protein, 369 aa, Methanopyrus kandleri
MRDSPDEVSVDELVNMAVAGGIDEGTALDALQGKLDPYKVMRAAHEARLKIVGEHVTFVVNRNINFTNVCINRCRFCAFRRDPDDPDAYRMTPEEVGERAAEARDAGATEVCLQGGLHPEATFEYYLEMLDEIKSQAPDIHVHGYSPMEVKYCAKLAGEDIEDVLRELKRAGLDSMPGTAAEIFSPEVRKRLCPDKLEADEWEHIIRIAHELGIPTTCTMMYGHIDSPRDWIDHMKRLRGIQEDTGGFTEFVPLSFVHSNAPIYRRGGARPGVSGMTDVLVHAVARLYFGPLIPNIQASWVKLGVKLAQMTLHAGANDLGGTLMEENISREAGATEGEQLEPEEIVEIIREAGFTPVQRTTLYEPVKVY

SEQ ID NO: 898 - protein, 380 aa, Methanopyrus kandleri
LITSVPTRSGLNPAGDRSDRGGRLKGNDLLELMDRANRLTREKFGTVVSYSKNVFVPLTRLCRNRCAYCTFRREPEEVRSPYLSPEEVFEIVEKGKEAGCKEVLFTFGERPEERYDEALEWLEEHGYSSTVEYLVDLCRRCVEEYDMLPHSNPGVITKREMRKLRRWNASMGLMMEILSERLCEESGPHEHSPGKRPEERLKVLKYAGELKVPFTTGILIGIGETWEERVKTLEEIQRMHERYGHVQEVIVQNFRTKPGIPMEDHPEPTPADLLRTVATARLILPDVPVQVPPNLNRETGQLALLAGANDWGGVSPVTKDYVNPEAPWPEIEELKRLTEDVGFRLRERLPIYPEYVRRGWYHANISEVVERLSDDEGFAR

SEQ ID NO: 899 - protein, 1080 aa, Methanopyrus kandleri
VGAGEMAEALGEELEREIQRRWEEMDLLSKVLEKNRDGPLFYFLDGPPYASGSIHLGTAWNKIIKDAVNRYKLMRGYRVRLQPGWDCHGLPIEVKVEQEVLSDEIECKKDIEEKVGVDKFVEKCKEFALKHVEIMTEQFKRLGVLMDWDNPYMTLDNEYIEGAWYTLKRAHERGLLDRDVRIVNWCPRCETALADHEVEYKEVEDPSIFVIFPIEDDSDAEVDLPENSALLIWTTTPWTLPANLAVAVHPEEEYVLARAEVDGEEWHLIVADKLKVVLSVVTDSYEIVDSFPGEALEGLRYRPPLWEEVPKLRELHEEDDRVHRVYTAEWVTMEEGTGCVHSAPGHGEEDFELGREVGLPPHCPVAEDGTFTEDGGKYEGLYVRDANEKIVEDLREKGLLAHEDTVEHRYGHCWRCKTPIIYRATEQWFLKVTEVKDEMLEWIERVEWIPEWAGHSRFKSWVENARDWCISRQRYWGIPLPVWECEECGHLEVIGSLSELEAKAVSLPPGEPDLHRPWVDEVVLKCPECGSYMRRVPDVLDVWVDSGVAAWASLGYPRREDEFERWFLKEGRCDPDDPEAGADFITEGHDQTRGWFYSQLGCGVVTFDTCPYRTVLMHGFTLDEEGRKMSKSLGNVVDPMDVVEKYGADTLRWYVLRSNAPWRDMHFSWQDVRDTHRALNVLWNAYRFTKMYSELDEFDPEEHPLEDLEEHLKPEDRWLLSRINSLVEEVTDAFERYHVHEAARALYRFVTEDLSRWYIRLVRERVWLEGDDPEKLAVYAVLHYTFDRLVRLLAPIVPHVAERIYLDYVRAGDDPESVHLTDWPEVDDRWVDEGLEKAMELVRKAAEAALSVRQRAGVKTRWPLRRLFVEVEDPKRLEDLKDVLARVANVKEVELGEEFPEKVPVAEPRPDKIGPEFRSLAGRVIEHVKDRAEEVARSILKDGEYRTELDGEDVVLTEEHVKVTEDLPEGWEAEEFEGGRVYVFVELDEELKSEAWAREVVRRVQEMRKELDLNLEERIRVWIETDEEIAEAVEEHSEYVRGETRADELHVNEGWPEEVDLEREWEVEDRTIRIAVVVSG

SEQ ID NO: 900 - protein, 918 aa, Methanopyrus kandleri
VKWMKVDPSEFELEFFEEIGFERKRCPECGEYFWGPPEAEVCNETPCVEYSFIGDPPASVKLDVWEAGEEFFRFFERHDHEVLDRYPVVARWRDDIHLTIASIACFQPWVTSGEVPPPANPLVINQPCIRLNDIDNVGRTGRHFTLFHMGGHHAFNNHPHDRRDIYWKEETVRLCYEFTVEKLGIPEEKIAFKESWWEGGGNAGPCFEVVVDGLELATLVFMQYEQVGGEYRELPQKIVDTGYGIERYAWITTGEPTAYDAVFGDLVDATARDLGVEIDGEAREILGELARVAGLMDVETESDLRVLRNRVARRLDLDVNELVRVAEPVEFVYGILDHARCLAFMLGDGVVPSNAGEGYLARLVIRRALRLLDGLDAEREYLLEVVERVLEDLRGTYPELAEREEYIQDALECEIDRYTRALKRGKKEVRKRLEEKGELSFEDLVELYDSHGIPPEVAREIAEDEGVEVEVPDDFYSRVAERHEGPEEVEEGLEELERIAVEEELPETELAFYDDEKRLEFKAEVIGTYEVNGDAWVVLDRTYFYPEGGGQEADRGTMRWKDGEAEVKDVQKVRGVVFHRIDGDVPPEGAEVECEVDGERRMRLTRNHTATHVILEAARRVLGDHVWQAGAHKSTDEARLDVTHHRRISDEELREIERLANEIVMKDLPVNKRFMDRNEAERRYGFELYQGGVVPGREIRVVEIEGWNVQACAGTHCDSTGEIGPIKIVGRERIQDGVERIRFAAGEAALERIWETEDLLRETCEVLRVNPENLPKTVKRFFEEWKEQRKRIERLERELVEAKLRAAPAEGRRVGDFTVTLVELEDVEVGSVAGTVEELVKEHENLVLVAKIVSNGSCQVVVGSGESAPPAGELMREIGKLIEGGGGGDERLAQGGGRNPDGLTEDRLVEIVEDLAGG

SEQ ID NO: 901 - protein, 591 aa, Methanopyrus kandleri
LTGIPEEVLEEPLRVARNANMLPTPEVISKIFQDRWQKRHFLKHVLDGKTARAHLEGYIHIHDLDYALTRSNCCQHDCRWVLKYGLYARNPIGRLTCVSKPAKHAEVAVLHILKWLMTSQNFFAGGQGQDFVNFLVAPYIAEEGLSYEEIRQLAQIMMFEATQDLVARGGQPAFTNVNLELTCPDFLEDEPAVGPGGEIVGTYGDFEEEAIMFARALLDVQLEGDAAGAPLKFPQIIVKVRPGYDKETLELAFEVAAENGAVYFANMLNRDWRKLVGDNVNYMGCRTCLATNWTGDWEIDTIRTGNFEYVTLNLPLLAHESRDEDEFLEKIREYCEVAREALLARWRCVKKCLEAGLYDGCQRWKPDGEYYFRYEHTTWSLGFVGLAEAIEVLTGYGFWEDPSAMRLAERVLEELNDVREEFHERDGRRWSVVQSPAESAAERLARKYLEKYPDAKVRGTEHRPYLTNSCHVPYDEDVNVVERAEIEAKFHPMTLGGHITHFWLGERTDPRSLMKLTVRVLRRNTIGFLAITRDYSVCDRCQRTYEGVVEQCPECGRRCTIWSRVTGYLAPVDSFVDGKKQEHKERLRHEL

SEQ ID NO: 902 - protein, 540 aa, Methanopyrus kandleri
MEPGFELKDVFRESPRKRGLRPGRHAFRATFRRDPVYLEYRARCEDPVGDVSELLAERYNTPGDLLDRLQMSSLDLVVPARPYVVRGGRPFAEPEHCDVGFATRGRVLLALVRAVMEAQRGSEDVVHAAATFACAPLLQCTGYRGDEWDCVDELAPVLDAPDSRELSHRERSIIEFADRASLGEKFVRTRAPSVDLYLVEAVGEVEPVAAEFTDYAELSLYRSDSCFLGLLVETPEGVLPADPEELLKAPEDWDVRVAVRGPINPAENPDPLLDRHEMVRLGEERGNLKQPEADVWAGVYRWEGWWKGRRFRPLRSVPMSIARLVWFARRLDLGMVPETLPEEFDVDVEAPTPWEVWIEGDSTDAFEAGCAVAIATGLIMSLNVPVESSEPTSVLHTAEDLEEIIGVRPLREALRKLESGVSIGSTEPVRGVRVKSDDVVLTLSWEDAAHLPWWVTSLSKIGEDVAEKLVERPELIRDPEFVREYVRTALASERHAFKIFRELVEERSPDFASSLLRFAASDPEMSFEVLDWLRDILEGP

SEQ ID NO: 903 - protein, 139 aa, Methanopyrus kandleri
LTEKVRRIVRIKATGDVVRALSRVVEEGLELSILNASVSPDAVAAEIAVQAVDDEHVRNFLRTLREFGIEVEEIEKTLVRDEDRCLHCTACHSVCPTGAIELKGVEVELDDEECIVCGSCTEICPVGALRIASKEGERG

SEQ ID NO: 904 - protein, 336 aa, Methanopyrus kandleri
MKFWIPHPGHTSGLEALLSGIDDLGRVEAVYTGGSPDEVGTGRPNLHYPRLDEVREQVELAHSHDVLYDVVINSTCPLRGEPTRRVAERYSNYLEELEKAGVDGVVVADPFVLKLAAEVFDRITVSCLAFVNTPEKAEFYADVATAITVDTSFNRRFEVLEELSRLQVELKVIVNEGCLLDCPYRPFHFNIFSHLYGPDEVSVYDDYYYRRCIADRLEHPELIIKSPWIRPEDLGHYLEYVDAFKISGRSHQVEWIVEVVNAYLEGRWDGNLLHILDCPRELRDVFYVPNPELDGAIERWKECDFRCHECGFCRELADRVVEVREFKSTVVGEVSA

SEQ ID NO: 905 - protein, 120 aa, Methanopyrus kandleri
LSKKLLRRCAAQLKRVQDALGDDAVVSEVDLFVARCGCVGVVFMVRGVELRDISDEVLDGLEEAGKALGVRPDVVYARVVPGTQVVIDLAVRTLCDTCRREFSGEEPRPDLKVLRGATER

SEQ ID NO: 906 - protein, 234 aa, Methanopyrus kandleri
LTRRWYLCCSRHHLDTVPEDSDGIVVPVTEHGVATLLPRYPETYEVEDIVDVAKDRGLSVQALMDFTCAGCEHLSPDGYPSLRSTLDYLASDLEVDGVVVADPYLVEVLATEYDLTVVVSHTAAVDTPEKAWHFERLGADVITVDPALNSNEEEVSAIRERVSVELRTAVGAITFRDPVAFFERNLFSHATAEGIEVDPYRNNPYEPMRERVVVWEVREELFDEVFILASGEPP

SEQ ID NO: 907 - protein, 501 aa, Methanopyrus kandleri
LPGRKSIDEINRRIERGEVCVVTAEEMVEIVEDIGPERAAKEVDVVTCATFGPMCSSGVFLNFGHSDPPIKMRRVWLNEVEAYTGIAAVDAYLGATQPSEDRGIEYGGAHVIHELASGEEVVLRAEGSVTDCYPRESVETLITIDDINQAVIVNPRNSYQRYVAATNSSEETLYTYMGKLLPEYGNVTYCGAGQLNPLANDPEFRTIGIGTRIWLAGSHGYIIGEGTQHDPSSGMATLMVRGDLKEADPEYLRPVVLEKYGVSLAVGIGVPIPVLDERVAASTGVSDADIEVPIVDYGIPSRDRPVVKRVTYEELRSGKVEIEGRTVRTGALSSYKMALEIAERLKEEIEEGEFTLTQPVEPLPREREFRPMPYRPPSLPRVRDIMTESVVTASPDESIEDVARRLIEKEINHIPVVDEEGRIVGIVTSWDIAAAVAEGKRRLKDIMTEDVITIRPHESVDEALRRMDRHNISCLPVVDGENRVVGIVTRTDITEVLRRRG

SEQ ID NO: 908 - protein, 374 aa, Methanopyrus kandleri
VECLVMYGEIAVKSPPVRRRMERLLARNLEEQSGGRVKRLEGRLLVADPEVPEAIGKTFGVERWTRTLRVDSHDPEDVFTEMKDVLNDLKARSFAVRARRATHDAPSSREMNVELGDLIRRYTGWTVNLDEPEVEIHVELRPEGTFVYLDSWMKDGPGGLPYGSQSRVVCLVSGGIDSPVAAWYAARRGCEVIWLHLDRGKYGSEVDAVERLAGKFSEWLPSDVELLIEDFEDFMESLEGLEGESARYRCVLCKREMIRRACDVCENVGAVAVVMGDVIGQVASQIPDNLAVIDRVARFPVFRPLLGFDKNEVQRLSERLGLFEVSKEHRPCPLAPRNPVKSADPGKVLKLEEELGVLHRGLRGSGVAGSEEYR

SEQ ID NO: 909 - protein, 299 aa, Methanopyrus kandleri
LCDARRGCSTLGLLDSLLGGGDEGSGEAEVREVRDEVIEVELIRGPVYFKNDSIIAARGDLEFLATKPVRSSGGITGLLEKVLKAKLLGLRRYFVKVDGSGVLYAGDGGKVKVLEVPEGETVTVNQDRLLFTTTPADVAAQLDASVLSTGLIDMGFEGPCKIVVTAECDPVTVEVDGGPVYVDPECLIAWTGDLTFSATWKGSAFDFLLGREHGEEFLLEAHGYGKVLVAPYDERIRRLERMIRRAGARGGGVVGGGENYGEEYGEEYEEYEESSDEGGLFDDLFDFDFDTDDFDLDFD

SEQ ID NO: 910 - protein, 636 aa, Methanopyrus kandleri
MDLAVQAHKVYLLGTRGLARGDWDPYSYTGRPPMIDYPVLPFLPAVLFHRWLADPYLACTLIDGVYRSLPCWIWSILKFKGMSTPRADAAMMVYAASVPFQIVEVFSTRVVTTFSLGTAGAALILRRCRGSVLRGLPVLWLWMLSLLGNPLYVLPALLLESMEERRLLLALLPAVPTAVLSTYFLTSAFTWVPPAWTRASPWEHWVAPGLGMLWAVFAASRGGGSVLPVLPWPILWSTEAIVGPVWPLSQLDPWRVLLTAILSSMIVVERYERLRRIAYLGSGLSAVGFPILALMVSFQPMHWESAGTASWRVLVAGDNGFEALSPEFSGKPVYSIAGAFYQGASEPQLQSLTPVLVLVNDPSVCSYLYASRWEFSKAVEVTRKELDPYLRALPIGYVDVRGTAVRRSTGRDRVSWCGRPVLTLDDAVPVKRFKVLYVGSFSLYGILWAKLAGALGRPPIVPGVYPRTVMSGQELDPNELPWTGDVLVVDKMGWREAVKLGLVKRARVVMRVSGGLLPWSWGADVDEVSARLVKYVDVVNGPRDDALRIDSDEIEVRTPGRAEFVLIPWGWAPFWAVNGREGQVCPVGPYMLVKTDGKPAIVRYVGWERHQSRAYLAGCILAVLVSVVWAAGRKPL

SEQ ID NO: 911 - protein, 564 aa, Methanopyrus kandleri
VPETPNKVLIIGSGPIIVGQAAEFDYSGSQACKALREEGVEVVLVNSNPATIMTDPNMADRVYLEPLDARIVAKIIEEERPDGILPTLGGQTGLNIAVELDEMGVLEEYDVEVLGTSVETIVRAEDRDEFRAFMKKIGEPVCASEAVSSVEEAKEVAEEIGYPVVVRPAYTLGGTGGGIAEDEEELKRVVERGLEYSRVNQVLIEEYVGGWAEIEYEVMRDGSGNCITVCSMENVDPMGVHTGESIVVAPAQTLTEEEHQMLRSAALHIIDALGVEGGCNIQFALHRETGEYRVIEVNPRVSRSSALASKATGYPIARIAAKIAIGLRLDEIENQVTGETYAAFEPALDYVVVKIPRWPFDKFPEANRTLGTEMKSVGEVMAIGRTFEEALQKAIRSLEIGEPGLGPSPEELEADPEEIRRKIETPNDRRIFCIYAALKRGLMSVEEISELSGIDPWFVEKVKRIVEMEHEIVRRKDELLEFIRTGEADEETVEFVREVKRTGFSDEQIAELLGVDEDEIREARLGVGVEATYKLVDTCAAEFAAVSPYFYSTYEEECEALRYD

SEQ ID NO: 912 - protein, 257 aa, Methanopyrus kandleri
LSSDPRRPTKVPWVKAMVIGLIAVMSAKALFHEWVVATLHPTNKDRLVMKVERVPCRTGDDLRPGNVEVYAKVYGCTKYATLGYGSQDPRRILVPALPPRLMSLTVTVAGNVIRVFRTCFPAPFIIVTATKLPRISVNQYEIRIHSPCKILLQPTVTGLLKYFPPVFITDGKSTRNPTHLTCRNVAIIMPYALTVMGGLTPIDVVSVVSVSGERLVVNASSVYAPKGVTIKWEPICPLIWTTYADIVWRWPYWPYSL

SEQ ID NO: 913 - protein, 505 aa, Methanopyrus kandleri
VGAYLSSHLDHLRGHSLEMAVLAILTVTALVIIPEDVPTIPYVSLISISSIKAAHDSLRSGELPQWNPYLGGGFPLAPTPYYLLHALGRTGLIIAILLLSVLVLLLASNVNNMLRVVITLPAVLLSLIIPSPLPLILASYALGFIGNNPLLRTVGSIGIPDVALSIELGIRNPSLPVLLASSACLVDCLVATFGAVPLLTSRPGPIPLLLILLITVVAILPALMALAMLGRIYPDYRWKFSGITAIILFGVQTYLHELPTALATPIILFSLLVLKNFNTHLDRRISVRLNRVSKPLRFLTALMLVLFFIVICSVLATPRFAVVGYKVVGSRTGMEYIISSDPWFSECVKRVLSGHPIWNTPLPTDPHMGPASLLGYELGDPRAVPPLYPTKQLEVQPRVVAPLISSPSSWAETSLHALQLAEAVASRGASVGEPRLNTPTEIRGYGLVGQVYDLWWKGGTHRGLLLQVNGRAVYERPSAWPSVVLTLMSIAVAAIETAKRKSDTV

SEQ ID NO: 914 - protein, 739 aa, Methanopyrus kandleri
MEIRITTILAIVMIIILNFIVEYEAPDLGKHIIYLDLAIQSLKSYLIEKYGLSGSDWDPYSYLGRPPLANYPILPFMVPVVIHKFLVKDIFLATCIGEELLRLAPIIAWIILQILNLNSAEATIALLAYLALYPIAILYEVKYIRIATTMSYSLAAIAVIIWNSKLKDPIKRMFSFVLWTASLYSNFIYSIPPLIVAGILDSPIFFLPIIVTFPVLLFASSVGKLEFDNLPESTTMGFSIFDVYDTILATIVVTSMTFLSLLLLNISHKKKFVIGTIGLIPLFGLAVFLSPKIHYIILSISKILTQLDMYRMPLIACTLIIVITPKIFSKIKLSLTTYSAIFALVSVGIILKVISPTPMIPIVVEYEFSSPAIVSHDYRASNAHLGLFSLACPLSTLSERPTYILGGAFYQGCSEVSSRILSSILFLNSGGRECCEQLAHPGQRHLFDEDIARKVLTLLPLTSVDYGADIKTIRSYSDIVGFTFSQKPTLSLWDIIPMTSVKVIYIGSYTDYSFLWLNLVRSAPTGHFPMIPLIRPYNVERGQSLSAEQIPWSGDILIVDSEALSYPETEKLAKEAKEVIVVYSSRAFDAEPPSKVVRRLRRITHHVHVLGPVHHPLHSPIVKKLVKESCVKLSPIHDALHRVSNDRYVLDSRGHRFVVVPWAWAPFWAVDGREGQTCPIGPYMLVKTDGKHTTLHYVAWERHQSRAYTVSLFLLAVSIAATAILISVRTTEGQAEGRS

SEQ ID NO: 915 - protein, 185 aa, Methanopyrus kandleri
VIATLALVNAYAASIPRYQIVKGKVTYPYFDEHDLLKTLQYPSVLGPAINTYLPTRTVVNCRQIMLYGLKRVGVISIGAPVTMLPTLNYDNLTKSSDNPIVTYYGISSNPICLSFPCIDVVKIEKDLLLIPTRNSLVVAKGRGEVIKGIEVVLIQGNWNIICMLPENAYSGVFTWKSELQPFWLL

SEQ ID NO: 916 - protein, 189 aa, Methanopyrus kandleri
MLSPETVVTINTIITSLPFLAAIYVIAKRPARALIQLYSLGYLTPVAVLVYGLAIPVPGNLYAYFTGAPIFLAYGVTDALIVLYALGSALAVIFVGIDQWADVAYSASTTVAWLLRTLIDPMSPRLAVLSGALITATINALVAWYKYQAWPIVPLPSVALQFSVAVASAVTLEVTAWWVLNKLKPSPQG

SEQ ID NO: 917 - protein, 356 aa, Methanopyrus kandleri
LNVDAVVLAGGFGTRLRPLTWDTPKPLVPILGKPLIEWVIRSLPRDVVHVHIAAGFSSEKLERYVESDPLPRKLHLKVEPKPLDTAGAIKFACRDSTADAFVAFNGDIVSSLDVRQMLKFHREHDGIATIALYPVPEDEVSRFGVVDLDDDDRILDFVEKPEPEEAPSNLINAGAYVLDREVLDYIPEGRPVSIEREIFPKLAEEGLLYGFKFEGYWVDVGLPETYLEAHRVLMEHECSGKSVVGARITDTDLKPPVVAAPMTELRSSEIGPYVYVGERTEINGSVIENSVILDDVEIIDSEVRNTIVAEGCKIENARLDGCVLGHDAEVCGCNLKGVRVAPGKEAERDLEDEWVI

SEQ ID NO: 918 - protein, 301 aa, Methanopyrus kandleri
MRDDVERTPDDLRAVLTLGFEDLPRLSSYQFILTTGSGSSHHVAHYASLLFTHELNIATVSHPGRLAAWADGADLAIVVSMSGGKDSHSIARALGCEILAVTCEENSPLADLADYLLLLPVEREEGFLNTRTIVSAMFALCAYASELSGEDLVDPDVPDRVERRLERGVPEDVILEMRDREKVFFIGDKYLYVAAEQAALKSIEVGDVNAFATTSDELFHGRFFGDHSERLYLCLNEKGADLIEERSGGEATVVRPEDLGLDVDPEDPNAPVETLPVLYLLVDEAYGPVDTTEARSWWNHV

SEQ ID NO: 919 - protein, 151 aa, Methanopyrus kandleri
LKILFRILERTPGVDGPERFLKFSLVGLSGVFVNLGLLWFLTEVVGIYYVVSNIIAVEVSIISNFILNDLWTWRDRRDPGLLNFLKRLAAFNIICAGGLVINTAVLWTLTELLHIYYIASALFGIAAATLWNYWMNNRVTWGVLLERAHEG

SEQ ID NO: 920 - protein, 456 aa, Methanopyrus kandleri
MGKLFGTFGVRGVVGEDLTEDVARRLGLAFGTYLGGDAEVLVGGDTRTSTDTLKDALISGLTAAGCDVVDVGIAPTPAVQYLVDAEGFDAGAVVTASHNPPEFNGIKLLGSDGCGLSREDEQEIERIYFEENPDRASWDRVGNRVSAPDLLLNFEEAVLDYVGDFDGEGLRVVVDAANGAASSVTPRLLSELGVEVISVNAHPDGRFPGREPEPSEENLETTMNMVRAAGADFGLAHDGDADRLILITGDGEFVPGDYSLAIVAAWALDEGKGSQVVTPVSSSMCVQKVVEDRGGEVIWTKVGEPVVVEELKRAEDPALGGEENGGIIYPDFHLSRNGIITALLICKLVAEVGSLDDLLAEVPKYHLHKTGVECPDDLKPKVMERVESLVEEEELEDVLTIDGVKLFYEDGWVLVRPSGTEPLIRVFGEARDRETAIRRVEHWKERVEEIVSELKG

SEQ ID NO: 921 - protein, 475 aa, Methanopyrus kandleri
MERLEWRESSPAEFFERNREMLGFDGPIKSMVMTVHELVTNSMDACHLNRIRPDVRVVIRREEENVYRVRVIDNGPGIPPERVPKVFGKFLAGDKFDPVYGIQSMGQQGIGAAGVALYALITTGEPVRVLTSTDGRTAHYFEVKPDPSTNEPVVVRREKRPASRRGTTVEVTIGDAVYESGRRGPREYLRRLHAVNPHARISLRDPDGNAHVWEPLVEELPDPPRVLKPHPHALDAHKLLRIAERTSRRTVRTMLVGELCRFSEARVEELRERLAGRVDLEKDPKELTREEAELIVKALHEMDFMRPPSDVVSPVGESALKAALKSEGARLVSAVSRRPLVLRDNVIQVEVAVGYGEEGDLWRFANRAPLMFRAGGCSITKGVEEVDFGRYGLEEDRLLILVNVNSPFVPFSGPAKQEIGSEYVEEEVKRAVQRACRELGREVRRRRRARLERQKMKRIDRNLRIVRKKAIEILS

SEQ ID NO: 922 - protein, 433 aa, Methanopyrus kandleri
LPVHAVVGFGYPKYDPVSWFAERSLIETLEVKTAESRCLELREGSTLRLEARRLGRREMSATALLERVEEPGEVHVFASSSLKGQTVDGDTVEDRMGEYLVDPLNDVGFEVEVHWSSAFDPLSLLPELIDTLTRLDDRVVLDLTHGVRIQPAISAVAGMAAARLPGSDMELVPVYGAAGVEVREVLRWSDGADGSRGIILDIRRHLESAMAFNKVVDYTLDPSREHLEELCELTESALRELDVPDDRLERVRELVIDEGALRGLADALRSNYPRKVVKEARKWEPKSPEDVLDRLHIESSGRERAEKYLRALSNFLARALNPFLQGLDLPKSPWKAAVQLAEWLCDRGYYAASVLLLRELVYLRTVYEWAEEHGHGELKEVVEEYLRALIDPDARKPRGVYDELCSTIEEVTDGEAGDPDDLVRKIEREILNR

SEQ ID NO: 923 - protein, 61 aa, Methanopyrus kandleri
VIGLFRGKRREIDYSIDRRELIEVVCEIRDVRNSFAHVREDVGRPDEKAQNLVKKVKEIIG

SEQ ID NO: 924 - protein, 318 aa, Methanopyrus kandleri
LGTAGRFGGWWRSRIRPPKRPRRTGEVRRLSWVLEMIRTLLCMYVGVLIASYLGSSEACTRSLLRVLKPVVGSGLYGHAASLSALSSSVALYAAQDKVNSTREAVGLLLLLAFPTSVATVLQFYLPVVVPAVGPAGLLMIGISVVGALLTSAFGRVLLPGREDGDGPSKITLVRNPWRTAHSVFLRVGPAVALAMVAVKLGEGYGVTEWVERFLHPLTRSVGLPSDASLVVFGCLINVAVGAALGADLWASGKLRMEDLALALAFGRALSLPRINLQFLFPPAVTFLGKKGLLGATVRTLVETLANISVVLALTAFVH

SEQ ID NO: 925 - protein, 325 aa, Methanopyrus kandleri
VRWTPALTAIVTLLAPVSSTMVNVAMWAGDGAASNCVESSLRAIEYWNANYAGTYHINVITYASPSDWRTVLETGRDPYTGTHIDVIYVPGGYHPEWHWDPDWIDLLYHAQIDLGIGYVGICAGAYLHAGVTHRGAIGEDLVVDGVTAIDGNRGNGYVSVLIQQNPITPQSTWGKVYEYYYANGPGMAAEDGSVFISDNRWYKVCWLDGKEVRINVQGFGKYVELVSGWAMVLGWYNVKKGDKWEPRGRFVLLGVHPELTERTGAWKLLARALIWAAGYEPKETPTKKQGPSEQTPLVPVPPICSPRSRRACGRSPRATPSCQGT

SEQ ID NO: 926 - protein, 476 aa, Methanopyrus kandleri
VSLRSKLADLAGLLALKAVRFGPGMGRSFPGWTVIKVGGFDAVRELARRPEYGVVLITGTNGKTTTTRLACALLAEDAEVSCNYDSNTINAVTTGLLKGRKAELVVTEYGIRSREYGIPDTVCELVDPLAIAYTTISKEHFRENADKKDPFGAYFEAKRLLARPLKDGVLVLNADDPRVTYIRDEKRGDPVEYVFYGLEVEIEDLTPPTEELECPACGGELDYETRYFNHKGLYSCRDCEFSRPDPDVAVVRLKGGPDEWEVTLSYDVTNAVIGERLEGKVTYELPLPGLHNVYNSVCAISLYLAVTPRPEDPEGTIRRVIEGLNPLEFIPSGRFEVLNVGGKPVGVGQGDNGDAFKANANLMLSVAGDVGACVYTTPDEGEHPIFEMHRIILRALEPDELYVFPGRESVKAAEEYYEELTEEFDAEFYPIPHERMQEKVEEMRRVCEEADGPVFASGCGPEREMWEALKRELRGG

SEQ ID NO: 927 - protein, 254 aa, Methanopyrus kandleri
MGLRRLLGLVGVGLIVLYFTLLSAEYSEFQRFLGDPWGRAVYVKLHNPDIAPGTPHIRTLVDFAKQHGYSKILVIHNAGKIGYSHFWYHGILIIQLGWYDYRTVFAQPELGLVMEDILYGQRPMLGIWIADRREYRSMSEAVNHVRDLESAVPGRTMVVWHGSCRNGNPLWNLGCGAEPYFWILSAYGGRVLALTFAVLGNFAPIVFYGDAALAELRNYDKLQALYNSGTLNRYAVDPYLRKKPMPMGPRGVYD

SEQ ID NO: 928 - protein, 343 aa, Methanopyrus kandleri
VRPVLEPLAEYHSIDDDELAARFMVARTLPVETTEGELEDLWKEHEEAMEEFRARWEERPAPGDIEETSPNLLDLKLEIARKILRECTFCERRCRVDRTREDGFCRVPIKPRISSEFLHMGEERVLVPSHTVFFCGCTFRCVYCQNWDIAFRPTNGVYVKPESLARVIRHRRSQGAKNVNWVGGDPTPNIHYILEVLRRLDVNVPQVWNSNMYLTEEAMRLLDGVIDLYLTDFKYGNDECAERYSNAPNYWEIVTRNHREADRQCGLIVRHLVLPGNVECCTFPILEWIAEELGTDTPLNVMPQYRPEHRAYEYPEINRRPSADELEEAWEKARELGFRYYRL

SEQ ID NO: 929 - protein, 305 aa, Methanopyrus kandleri
MSKLDEIMVKGDPELLGDHLGVFTARSTERKVTKVTQDGGIASAVMIYGLEEGLFDGVIAAVADPDDPEEPWKPRPVVITDPDEVLEAAGTKYTYCPNVSVLKEAVRSYGCEKVAMVGTPCQIRAVRKAQLCPIGMRHVPDKIELLIGIICMENFPYEGMKTIIEQLCGVWIREVTKMDIGNGKFWVYTKDGEVKSIPIDETHPFEGEPCHVCTDYCAELSDLTAGSVGSPDGWSTVIVRTEKAKEILDDMVEQGLLEVKSIEEVKPGLGLIQKLAQVKKNKNQKEIEERKELGLPEPGKVHESL

SEQ ID NO: 930 - protein, 252 aa, Methanopyrus kandleri
LVRWWRRLSRAKTKSTPRSSCDVAYVQLAGCCGCLVSLTDTYERLLDILDSIELVYCQTLMDEREIPECDVAVVEGAVCLNDEHMLEEVEELEEHADTIVALGACASTGNFMRLSRGNQQAAPTHEAFVPLTEVADVDYAVPGCPPAPEAIKRFLTLLLEGKEELLEPFAKLAEGKTEYCGCDLMYHVVNKSMCMGCGTCAAACPTRAIEIVDGRPVVNENRCIKCGACFTQCPRTIWPGDEAIKELIMGGE

SEQ ID NO: 931 - protein, 416 aa, M. kandleri
  MISC_FEATURE: selencysteine
  MISC_FEATURE (388)..(388): selencysteine
LAEGAVEIQPTTRHEGHAKLVLYVDDEGYVERAFYLNTSAVRGFEALAKGRPAEFVQVAVMRICGICQATHGTASAEAFERAMGIEPPKDGKLLRELCALGNRIQSHVLHQLLVLDDFVEDESEKVEAVKRIQQIRRIGQYVVDVVGGEGIHPPNIRIGGMAENISEAARRKLYRRLREARELMMEQHEFMVNIVERFGDENDLDIDEFGRHDQPFLATHPTYGDPDRLDMDRVVELLPIEYYGEEHKEVAYQHRGQIPLYDGVPVEVGPRARYILFDGVDPRGVLYIHVLRSQETLAAIDRAMTILDELNTSGKTLAEWEPKAGVGIGVHEAPRGTNVHIAKVNEKGIVEDYRIIAASTWNFPVVEKAIEGENEEYAEVIMRCYDIXASCAAHVVKEVRDADSREKIRESVVKLA

SEQ ID NO: 932 - protein, 523 aa, Methanopyrus kandleri
LSQSVLIVDALGAGKGWRTRSRDVIGAGPRTVASLLESDYEVSLITYEDLQKLGLDSVMDYDTVGVSIMTGDERAARRMFDHTRSRTFRFIGGPGAADPNALLKTGADAAVIGEAEETLPELLEERGPVRGVYFRRGTEVDFPGPRPISRRFTRVNPEYIRAYAHRWAARVYVEIVRGCSNSCRTTFELPDGRKCSGCGNCREGEGGERWECPEGIPPGCGFCSVPSIFGPTRSRPLNEVVREVRGLVREGIRRVVLSASDVLDYGRGDLLTDPRTPPPNVEALRRLLRRTSKHVDVLFVENVKACLLNREIAELLGEYCRGTSVSVGVETGDPRLLRAIGKPSTLKEALRAIRLLRRAGLRPHAYFVYGLPGQTMKSAKLTAKAMKRAVEMGAEKITVYRFRPIPASAFGDFPPGPSPRNDEASRLIADTARRLNEALKRRMIGKRIRVYVAEPDLRRPRDAIGWPVKGGPKVRLKGARELVGTECEVEITGVVSDKVVSGKVVRILEEIDVEALEGRGVPG

SEQ ID NO: 933 - protein, 347 aa, Methanopyrus kandleri
MKLKIWSPVRLFGATPGAVVGISLTDIEVLFDPGGWRPGYNRRVPPWAELPEDLKSAPGLFSRFGEPYPDYTLVTHHHTDHAKHGGEYGEPFAHPGAAERIERRFDYRPEDPNRCEIVVETVETGHCPGAVAYLVELDGIRVLFTGDVSPETFLDARLPRADVLISECSGVPGHLDRVGLELLCRKAKPRIVVPVHLIAYDPWFVRELDVDAAVIEPHLGLSVDLEPALNAEVPCAREYHLCTRCERGRGCPVFRFVRHLRCPECGNPPTLDGEDPESVRLVCPRCGTRSNTVDYAEIIKAVAEYAMERSDVGDWSPTEARPGEYSSSERRLKEFSPRPGGGEDRNV

SEQ ID NO: 934 - protein, 278 aa, Methanopyrus kandleri
LRSVEYLAYLRSKYGIRPRRRLGQHFMVDDNILEFMVEAAEVREDDIVLEIGPGPGLLTRYLMTRAGQVIAVELDGRMVEILKRELGEAPNLEIVRADFLEYDVPDDVNKVVANIPYNISSPITFKLLELDIDVAVLTYQREFAERMVAEPGSKKYSRLTVMVNLLADVELLRGVPRRAFIPPPRVGSSVVRLTPKSEEERPDVDPDTLESVCRALFQHKNKTVRNALLLSAHEWATDREQAREVLEELPEDLLSERPLHLPPERVAELAAAIESALG

SEQ ID NO: 935 - protein, 278 aa, Methanopyrus kandleri
MKVSLAGQTVDVKKILNEIPKRTVTAALLEGGEIVAVEEADDEHAERKLVRRHDVEGKVVFVTARPCLYCARELAEAGVAGVVYLGRGRGLGPYYLARSGVEVVEVHPDEPLGYDPVDRLDVLLTFGGNPYLTEEDVAARVYCLLTGRGFDADIAPAPENLSGRVEIMVTRGDPDEAVELLKEELPVFRIRRFLISGEFDRDELRERILEDIEPRILDPFAVRARIARAGAFSSSREAEVFIGDVLTSVGREVNLNDPRTVVTVDVLGPRVSVGVEKR

SEQ ID NO: 936 - protein, 87 aa, Methanopyrus kandleri
MPERLYVRDYMVVGVAQVRMTDTVRDAVREMARAGVHGLAVVGLDGELVGVLEEEHIMDLVVERRGDWADILETPVEKVMNPEPAIV

SEQ ID NO: 937 - protein, 423 aa, Methanopyrus kandleri
MEEADNPVLNLVACLSRAFDSLDSAEIKVPEGCRVVWHGEHLLILSKDESMEVRLNVPENVTISPRVAEGPMEIRVHVEREEEPERGLEDRLLSAVREFRRRLRELSVSTSRREEAPSEVAIPPIFEVDSPTLLELEYSMGRISYVFGRTELKRALFALALAKTATVCAARNAVSSPTNLVEEVEADTVVSPYLRVGREIVELDAIPANRVISLKKIPEDVKVWWLNWKYLPRVMAWGVDGITAEIGWRSSDLAVGYVDIQSSLYAHFLSALLNVPLFDFSYMWFLQRRTKRSKRKLWKDEKGECHYVFWTQMEAFEKLGVEDVILLCTREECEGWVTECVREDTDVRVVEVFEEDTRRMGLRVEELALTLGEEIHDRHPVTPEHPRIPSQLGSAPELPVSLDTYLTVAKMAEERILPIISSE

SEQ ID NO: 938 - protein, 192 aa, Methanopyrus kandleri
MILGISGSPREGNTEYLVRIALEAAEEVSGEETEFITVRDLDISPCEACGECLETGECAIDDDMQDVYELMRECDGMIVGSPVYYGGVSAQLKALIDRTRPLRINWELKDKVGGAIAIGGARNGGQEHTLRDIQNFFMIHAMIVVGDSDPTAHFGGAGVGLEPGDVEEDETGIETARNTGRRVGEVVKLIKG

SEQ ID NO: 939 - protein, 279 aa, Methanopyrus kandleri
LRRVVILWNPDDPASKNIAESLTEDAEKLDTEDLQHYTVETWERDGVRFHLTAALGDLIEEDEARELARKFDVIVFASRHESRTKKPSLTVHVPGNPTPEAKFGGKPLEVCTADPAGMKAALLELKRFRDKRGLDYDVCYEVTHHGPRDPGAPCFFIEIGSDEERWTDEEAGEACARAILAAVDPPDVKAVVGYGGGHYAPAHTDAALSNRKLAYGHIVPDYAVDHDYLRDQFREVVDKTPRAREIIVDDRNLDSGIVERLEDLVRDRGLRLRDVEEVK

SEQ ID NO: 940 - protein, 276 aa, Methanopyrus kandleri
VLSREEFARRLEEELPDVADSVPHRWQELGDVVVIRLFDERAWAYRREVGRILREVTGARSVVALRRVSGTFREPVGEVVAGDRNAETVHRELGIRFKLDPTRVMFARGNLEERRRLLESDLEGKLVFDMFAGIGYFTLPAALAGAEVIAAELNPVACRYLVENARLNGVEGRVRVFLGDCREVARFVRAADRVLMGYLKGTLKFLPYACRAVRDGGVLVVHEVFQKRWGEDRVAREVLNALPDGFEGEVLEVRRVKSFSPALDHYAVELRVRRRR

SEQ ID NO: 941 - protein, 254 aa, Methanopyrus kandleri
MRVGIALSGDVPGAAERVLEAVERADVDVVVYHNVELDADVEEVRAKDPGRALVEDLVEGRLDAAVRGAVSGRCVRELVDALDLPFTGRSTVLEAEGRRVLLAPVGIDEGWEVESLVKLGELAARFHRRLTRREPSVAVVSSGRLEDFGRRSEIDRWLADGELVARLLKERGMEVEHVGILVEEALERDVVLFVNGVLGNLTFRCLSLVAGFRSHGAPVLAALERGVVFVDTSRAQRASGYARALRLAAELAGG

SEQ ID NO: 942 - protein, 394 aa, Methanopyrus kandleri
MSRVVLAYSGGLDTSVCIELLRERYGYDEVITVTADVGQPEEELREAEEKARKLADEHFTVDCVDEFVCEYCWRAVKANATYEGYPLSTALARPLIAQKVLEVARDVDADAVAHGCTGKGNDQFRFESYLRAHGGEEFEIVAPVRDLNLTRDEEIAYAEERGIPVPVDVDSPYSVDENLWGRSIEGGVLEDPSEEPPEEVFEWTVSPAEAPDEPEVVEIEFEDGVPVEVDGRDDPVEIVRYLNETAGEHGVGRIDIIEDRVIGLKSREVYEAPAAVTLLEAHRALEAFTLTRRELSLKASLEEEWARLVYDGLWFNPLREHLEAFFDSTQRHVEGTVRVKLFKGSATVISRESPRALYEEELISYEEKQFDQRTAEGAVKLHGLQERLALRRRG

SEQ ID NO: 943 - protein, 371 aa, Methanopyrus kandleri
LSWRVIAVRDLRAWLKDRRRLAPTLIMPVITILVMYGAFHDVKPRHVTVAVLSHSSDFDPVLDALKSDDRVGVVHVRSVDEGKTMVKEGRAVVFVYVPKGFPSDKATVYYDPSDPMGSNYVRGVIQRAWVKRVSEEMKKVVRDLQAAFRWMPAPQPPISRVPGNPFDFEAPVKGLKYFDFLVPGLVVLTATMGSIFGMGRVMMEEIETGVTYALFAAPIRPRDVVIGRFLNMSLWGAVRCGIVLVTALALGAKVPHPFLLLGVGILSTATMIGFALLMASLAGRSEVAEMLTGALTTPMMFLSGIFMPPSVMPEWAYEVARVNPMYYMGDAARKAALLGYLDPVDIAVLVVFATVFIATGAMLYDRIREHL

SEQ ID NO: 944 - protein, 235 aa, Methanopyrus kandleri
MPPAIVAEDLRKEYGEVVALRDVSVEIEAGELVAILGPNGAGKSTFIKIVCGVTRPTSGRIEVLGGDPADPEIKRRVGIVPQQGGLYPEQTVRENLRFYSKLYGREPDPEPLEMLEVDRFMDRKAGQLSGGMRKRAAIAITLALEPEVLVLDEPTNELDPMARRDVIRVTKEFHRRGTTVLYVSHDVYEVEQLRPDRVLIFLEGRKELDEPFDEVMERHGSVLEAYEGVASCPGE

SEQ ID NO: 945 - protein, 207 aa, Methanopyrus kandleri
LITSHAHVPIPSDPVERIRALRVLREAYRRGKKPSLEVTYRTMGGSTCGPYYVARWRRDSRFKHGRTLYLGKPENESVRFVEWLVSLDRGEVLELARHLMRNLRSVLKTLLAEVSDLPYKRARRVLARGLSLAFNARPSESPRIRDLLEELPDRLESFLIRTLGGWPAHYSIHLRKVIRSRKRSLDGRYEIPDVGLELEHWRLRHGT

SEQ ID NO: 946 - protein, 103 aa, Methanopyrus kandleri
VISHVGIVTIIILISKLISPSRKRKFYRTLAFVYAVLGFIPPFAWLLGGFACHRINLDLRERGCASERHTPRYAVLTILTLGLYQSYWWYVTTEDVNRCLRRE

SEQ ID NO: 947 - protein, 501 aa, Methanopyrus kandleri
VVTIPALIVLFTVLGPVAAGPVNLSQTSGGERVIVAFNPDDPNAWSAVHRHPVGLERGPWAGNFYDARCFPNEVTTHGTKFVFEKSGGLVYGLKVEPGDSITLPEPASVVSVAYAAVCWWENGQPFKRVTLIVEDSHGRQATTSLTLADWCARAFSPHAPDHNFLVCEFDHRLSVEERKIRFFIIPIGITWKWRVAGLKCGVWAFRLSASELGLRDITRIEFRYGDGHLYILAVTITPTGPFDDIVGGPNCSGTTVGPDGMDEVGSCYWEGEWPARFGHTTVTANGVPFLIPPASGPNALLANGRLVELPRPARTVWFLYAATNWWFGDKPYGPVDLVVVDDRGRTVTARVLLVDWCAHDVVPNNIEVLAFNHRAIPGGLQSIHCGVWAFELDAGQLGLPNIKAVYFPSMGRRKVWILGATLDGQPVGLGELRPHRISHPWSGFKRGVVYPGGETLDGTFLLPSECRKVQRTPIEGLADGNAERPLELEDRGRERHLRTRG

SEQ ID NO: 948 - protein, 699 aa, Methanopyrus kandleri
VGNDIVPIELHTRAFDAVGTRIILPEDKHVTAVYVLYAATCWWDKDGNPVDAVPMTVCYDDGSAYSTSVGIIDWCATDPRAYDDEKRRVAAACAVLPQLEAHWVRGEPLVYQTPTLVFPKRVFADGREEPNTKRPILWLLKLVFPPDKRPTWIEFGYHPGHLWVLAITVRTTDGKYYALDKDGRRDLGEPEQKVVLEPNGGELLTADTSGSLFGTSVKVTAEWCWPKNAQVEALNLKFEWPLTTTALGSALSVTVRVPSGHLLRDAIPTPDDWYLKWLRDQLRDEIIRSADNELRSLSLSEEEKEIARRCIEYSANLTANTARGDAFAALTLVALYDRLASRIAEKLGVHVYRAVPAYVTVLTAWRADLWAILEHVNERISKHSKVLTSLALPKGYDTLRHIAFTQFLIYQPTLGLEVYGPSLEARAVNAVLSLLLPGLEQTILEIGRGASVAEGDRVDVDWQEVRDKLGNNLREIGIKDPEGTAQEIVEALKYLTELVKYEDMDERLKSAGVQRYVDPFLERVPVIFNRTPSLEAAVLSYTDVATWTTTIYTLFPVPSKGASTPSGCFCGPMTDNLKRFWNSLADSILYFLAYHALGNAAISLAISLLIGGAIGEIAAGVLTPVIVAAIKAGYFNDWSDWNKLKMFANETASTAPASFTAKLQWAIHCYGGGRAKAIATTVSFAFAYLSSVCTGAKLP

SEQ ID NO: 949 - protein, 333 aa, Methanopyrus kandleri
LYRGETAVGGSRVGDPWEELERFSDPELLEFSKRLDVELSGEELKATKRRVEHVESLKIKCIIVIPILALVGLAINGKMLSILASIYYEYPAYALTHAAAVLAWDVAVIYMLRPGLYRKEKRALELALRVKKPVLAYFSLYHPLTAPLAGFIILIFSSYKPLHILYKNPKGAIIMVIAYHVQIFIPLISYLVLRLTRTPVILSYSLIVTKFAVGRPVAVEKLWQEAREYRPLTLPRVAFIGVSLASTIGMLLLIGLVRLLHIEYSTKGIETIARMAPLVTLGVTPIVTVKARNLLARVPPTTIAEGILTALNVLAAFTYTIPFFVILLYYCLP

SEQ ID NO: 950 - protein, 182 aa, Methanopyrus kandleri
MELERVAEFELEDIKVVVLRGDITELNADAVVNPANSRGVMGGGVAAAIKAKGGEEIEREAMEKALIPVGEAVETTAGDLDAEYVIHAPTMERPAQRIGVENVREATEAALRKAEELGVESVAFPGMGTGVGGVPYEDAAETMVEVIERLAPELESVRAVYLVGYEEELAEAFRRALERRVG

SEQ ID NO: 951 - protein, 329 aa, Methanopyrus kandleri
VNGLKPCSVRALPVRGSDRVDPWSALAVMMGCFVGFHFLSELLVDATVGLARKYGLSESVAGATLAAIGTSAPEFGSSLSSILLEHPNVGVGTILGSAVYNVTVIPGLAALAAGGLTLERAVYRRDVLFYLLALVVVLVSLWDRVVLRVEALAWVALYGLYVLLMRRTDESTIGAEGDTGEASLRSLVVRVSVAVVGIAALSDLMVRATVDFCEGFGLSESRVSLLLNAAGTSVPDTLASVHAARRGFGSLAVSNAVGSNTFDLLVCLGVPLSLVSRTPVHGELGATVLALVGCVVLLYLVTVDGKLRNVEALALLGAYAAFVACLLVL

SEQ ID NO: 952 - protein, 346 aa, Methanopyrus kandleri
MGSRTMSDGALREWEGRTWEEVDGKVRCLVCPRKCVIPEGERGFCRVRENRDGELVLLIHGKVSTAVPDPIEKKPLFHYKPGTDVFSLGTVGCNFRCRHCQNWQISQAGPEEVPLEEWPPERIVGAAKRTGCESVAFTYNEPIIGLEYTLETFEACREEGLGCVYVTNGFATRRTAKILGEVLDAANVDLKAFTEDFYRDVAKAWLKPVLRTCKIWKDMGVHVELTTLVIPGYNDSEEEARRIARWIRKELGPDTPWHVSRFHPDYRMLDVPPTPVETIEKFVEIGYEEGLYYVYAGNVPGHKYENTYCPECKEPVVVRRGFSIVKMHVTDDFHCEHCDAELHFVT

SEQ ID NO: 953 - protein, 271 aa, Methanopyrus kandleri
VRAYLELARPINCAMAALGVVVGELIAGARLDVGAVLAPVVAAVVCAGGNAINDYFDAEVDAVNRPDRPIPSGRVSPRSARMFALGCFAVGVGMATVINRMCLAIAALNSVLLYLYSWRLKGTPLIGNVMVSYLVGSCFLFGAAVGQRPAPAVWLFLLAFLANLVREILKDLEDVEGDAALGLKTLPIAYGEGVALRVATVFAIALAVLTPLPYLDGVVGWPYLVLALPAAAVILLASVLAVAGSWDAGKAQRVVKVGMLLGLLAFLASLL

SEQ ID NO: 954 - protein, 375 aa, Methanopyrus kandleri
VVSVAEEKVTVSVIKADVGGFPGHSEVHPDLLEACEGVLEDAVDEVIIDYYVTRCGDDIDLIMTHTRGEDDEKVHELAWNAFQEATKVAEDLKLYGAGQDLLSDAFSGNVRGLGPGAAEMELVERPSEPIIVFCCDKTEPSAFNLPLFRIFADPNNTAGLVLDPSMHDGFEFEVHDVIDQKKVILKCPEEMYDLLALIGQTQRYAIKRVYKKGDGDEAERIAAVTSTERLNLIAGEYVGKDDPVAIVRCQSGFPAVGEVLEPFTFPHLVAGWMRGSHNGPLMPVSEEEAHPTRFDGPPRIIALGFQLRNGELVGPQDLFADPAFDRAREIANEVADYIRRHGPFQPHLLSEEELEYTTLPDVLKKLEDRFEDLEE

SEQ ID NO: 955 - protein, 116 aa, Methanopyrus kandleri
LFPGGKIDPRKLQRLMREMGMEQEPISGVERVEIHLKDGSKLVFEKPQVIRMKIMNQEFYQVAGKAKREKPEEEPFTDEDVKLVAEQAGVSEEEARKALEETGGDLAEAIMRLQGE

SEQ ID NO: 956 - protein, 150 aa, Methanopyrus kandleri
MSRYVEIVRGILAYQFGREAADAMLDGEVKVRVRRGRPREVFVDGKRLCTVRASDGLVSLAPEGARRLHAATEPPEHRVVCADEWVEAVRRGRDLFCEYALRGWEELRPGDECLVVSEDDELLAVGKMRLSGWEVEYFEHGVAVRVRRGL

SEQ ID NO: 957 - protein, 445 aa, Methanopyrus kandleri
LDPDVLLRHAEEISDACVVYALEGELVEIEASNGELRKADSDRVRTYAVRVLKEGSWGVASGPDPERDLVERALRSTGEGSAEIPEEVPAAEGSYRWEGKLSPLDSLDEAAELAVELSREVSYDCEITYSAGSVRYTITSTWGSECEVRLDCVNFGVKVSGKGTAGREEYTERDGANCAGLELFLERAEEVRDEAVRRLEDLLEAEPGPERAESVITDPELLGVIVHEAFGHAVEGDLVARGESVLQDWVGERVASEIVTVVDDPTERGAFGSYPFDDEGVEPRRTVLVEEGVLRGYLTDLTSAAELDLEVTGNGRLESIGDHVQVRMSVTYVEPGDASREELFEEAGDGAVYLLGSKGGQTDTATGNFQFSAKLGYVVEEGEPSRPVRDVGLTGETLEFMKRVRMLSDELRLHPGYCGKGGQLVPVSDGGPHALVDGPFHLRSG

SEQ ID NO: 958 - protein, 409 aa, Methanopyrus kandleri
MALDDPLSQFEPGRAVLLEVETERVEVERTHDTGDRGRVSADRTIVVRVSTDGGLGVATVADPGEVDTAVERALASAEMGTSEPVEYPDSVDPARVSSCDPSAVDEDELWDLLEAVVNEVSDDVTITSVSVTGVRRRVIFRTPSDQAEREESSVTVSLDVIGEFSGFAWDTAVGPRDIDPELLAREASEMASEAPKERVSGGELAVAFHPRAFSELLTYVLIPALSGLEVLKGTSGFDRGDIGRKVGPESLRVVNDPTLDRRPGSYAFDDEGSTPKRMELISDGILRSFYTDLYSSRRLGMESTGSGLGIRRPEPSPANVIVQGDASEEEVLEEADLIVYRTLGAHTASKVSGRFSVTALWAETVEGRAVPVSVRGNLYSSLRDALISEETERTGVVEPPYALLRCRVG

SEQ ID NO: 959 - protein, 126 aa, Methanopyrus kandleri
LDPLTEDDVELREITLMVPIAEANLISNHKFRNRKRDAAYASYLVGSSSTDVDDVIPVTVRIPWPKDVKAPREMPLVPGTLTHHRRFCFTVPNPPETRKLSEKTLVTAALLRTLSHELDLTSAIRY

SEQ ID NO: 960 - protein, 461 aa, Methanopyrus kandleri
VADVKIGFEVHVQLDTRTKLFCDCPTDYEDAEPNENTCPVCTGMPGAKPLPPNEEALLIALEIAHMLDCEPVLDRPLYFQRKHYDYPDLPSGYQRTSVPIAVNGELDGVRIREIHVEEDPGRWEPSTGRVDYNRSGVPLIEIVTEPDMRSPEEARDFLRRLMQVLRYSGKVKGDGGIRVDANVSVEGGARVEIKNINSIKGVYRALRFEIQRQLNLMKHGREVRRETRAFREDQGTTVAMRSKETAEDYRYIPDPDIPVFEITEDLWEKAVARAPEPPHHRARRMAEEYGISLEAAEALVTEREWADFFEEVVEKAPDDWDIEFIDQWVRKEIKKILNKKEMTFREAKITPEEFIELLELVREDKITRQNALNALWEAVDSDKSPVEIIEENGLLKVSDEDRLARVVEEVIEENPQAVEDYKSGKEEAIHYLMGQVMRKTRGQADPEVTMRLLRERLDSDG

SEQ ID NO: 961 - protein, 232 aa, Methanopyrus kandleri
MGVGEVVDNIGRGLLSEDRRAREAAARYREWAESLDEEELFRYVRERTGGLGHGKEGFEVGKMGLKGYVIAWPEQARGMVLEIGTGLGRTTWALLRWGDPELIVSVEVDPRMLAIALYRNPVPEFSEALRDDRVKILLGDAVEVVPKLPRGFDHVVHDGGPCPGRNPRLFSPEFLRTIAEKLKDEGTASVFAGRDPRWQDRIYRALSRLFLEVRAESFPDTPTVVFRCEGRR

SEQ ID NO: 962 - protein, 82 aa, Methanopyrus kandleri
LPEDPLRGYEPSVRDYLARCDTDEEALEVLQYLVKRGELDEERASELEREIREKGVRSLVERRHFGYYLERYYDPEERRYRG

SEQ ID NO: 963 - protein, 283 aa, Methanopyrus kandleri
VERSPAVAGQFYPADPEELRKMIEWCFRHELGPGDLPETNDGPCTLPGVVAPHAGYQFSGPVAAHTYKVLAESGTPETVVILGPNHTGLGSAVATMTDGAWRTPLGSVEIDSEFATALVRKCGVMDDDLTAHANEHSIEVQLPFLQYVYGESFRFVPVCMAMHDLQTAREVGEAIVDVAEELDRNTVVIASTDFTHYEPHDQAQKKDRKVIERITALDEAGMIEIVERYNVSMCGVGPTAATIVAVKAMGASEGELLKYATSGDVSGDYSQVVGYAAIVFRRG

SEQ ID NO: 964 - protein, 140 aa, Methanopyrus kandleri
MHPIESLDLALTALIAGLILTSEALRLFPFLSYLVRVPLRPITLVLALAALVLTFIAPIKGYVPTLLTLLCSVPKLSIGGYLLSRVWWVVSGLRDGLIGALRLSLEIRTLPFDLSVGCALTASGVLGVLRWMTSVPAVPW

SEQ ID NO: 965 - protein, 656 aa, Methanopyrus kandleri
VEMEREFEEALRNSKTFLRSIDRVITDYPKWRTVVVDLEEFDEPDIAFAVSDDVVEAMKVVQRVAMELIKKERPDVDRVWVEFRGSPIRLRARDMSVEFKDRLVTVEGIVRRVDNVAAEVVRVEAECPQCGNRFEVRRREYRPDVRCPNCGMRCEPDELFYTDYQLVVLQEAPEHVRGGEQPATVEVEFRYDHINRVRPGDRVRVTAVPRVRLPSSSPRPGDTGEIVLEAHGVERSDSPLPEEDLRFTQDEVERFEELAEGDPLGEFVEAVAPHIHGHEVIKKAVSLQLFSCVEEGQIRERVHVLIVGDPATAKSQILQHVIEHLAPRGVYVSAQHVTGAGLTAAAERTEDGWTLEAGAVVMADGGVIAIDELDKASRGDLNALLEAMESGKISVAKAGITTTLNARCAVLAAANPEAGRWQGGHPIEEINLDPALLSRFDVILFTRDEPDPEQDKLVAERMMEAFDGEFDEIEGKYELLRRYVLYATKEFPNVTISEDAREELRDWFVSARQEAADRIDEGDLRTVPVTRRQMGSVLRLARASARMRLSETVGRGDVSVALSVVEEFMKEVMQEDGVLDADVIETGKPKSVREVREYVLKVVRKLAKKHEDGVPKREIVKAVKHRVSRERVEEILDDLVEEGSLLQPRPGVYLPM

SEQ ID NO: 966 - protein, 224 aa, Methanopyrus kandleri
VNGWLNMSEELSRRYPAVRVPAGELAHSEPTEDGFVTPRGVRFHRALVVGVLSGRYVDEEREFAVITVTDDTGSVDVFAFDECYEPARTLDKWRQIKVIGRPMEPREEGRPVALRAEVIRLTSYSEELFRRLEYELMAGGEVPTVEKPPTLDEAIEMVYKELLEREEETFSREELYEVIRSVVPLADEEFCEKIIKEMEERELLYPMDLPGGKRWSVIETGWGL

SEQ ID NO: 967 - protein, 138 aa, Methanopyrus kandleri
VVEYDYEELLERAYEQLPEEVLEDRRFEMPKPKVSVEGKTTVIRNFKEISKKLDRDPEHITKYFLKELGTAGHVDGGRLILHGVYHPKLVEEELKNYVEEFVLCPECGKPDTKLVREDRQWILKCEACGAWSSVRRLK

SEQ ID NO: 968 - protein, 114 aa, Methanopyrus kandleri
MARVLLNIHGTGDTVVLALCDEDLLGVELKYKGRTLHISEPFYSGKSLEPDRAAKKIREAVQEYEDEKTVAINALGELACSVVVDAGLAREDEIGELGGVPHVQIYILPREPFL

SEQ ID NO: 969 - protein, 352 aa, Methanopyrus kandleri
LTSGVLCTTAPGLEDVCAQELGEITGKSVRENYLGVRGRVLVECSEHEALDLAREINRRSLTVHRAAVLLGGFEIEHRDERGLEEIRERCRELPFERYIHEHDTFGVRPSRLGEHDFTSVDVGAAVGDAVIERIKREEGFRPQVDLDAPSVIVRADVVGDTVIVGVCTTGDRSLHQRGYRVYDHPAALNPVIAQGMLELAGDPDSLIDPTCGGATVPIEALLRDPETEAVGVEKFRTHYEGARLNVLAARVDVELYLADATRLFEEVPELRDREFDAAVFNPPYGLKIANPRVVKTLYRGLARVLSDLVSVVVTVTPRDGWMRAAMEEYGFRLSHDRWVRHGGLDVRLLVFR

SEQ ID NO: 970 - protein, 241 aa, Methanopyrus kandleri
MRSVGSPPMIKAVLFDVDDTLYPSSKLAEEARRNAIRAMIEAGLETDLSEEELYRELQEVVKEYGSNHPRHFDLLLRRIGADPEPKLVAAAVVAYHDTKFAYLKPYPDVIPTLMQLREMGFKLGAVTSGLAVKQWEKLIRLGIHHFFHEVVISEEIGVEKPNPKIFIEAARRLGVKPEEAVYVGDRLDKDIRGANRAGMVTVRIRRGKYQDMEPRNDDDVPDFEIDRPRELLDVVRELAKD

SEQ ID NO: 971 - protein, 252 aa, Methanopyrus kandleri
MGGLPTLRIEPVPLERKVRPGDDLAELIAESAELEEGDVLAIAHTVVSKAEGALISLDEIEPSPFAKTLAERTGKDPRVVEVILREAESIVRVGPDFIITEVRGGMVCANAGVDESNAPPGYVIVLPEDPDRSARELRRRLRELVGVDVGVIITDTQGRPFREGVVGVAIGASGVPVLADRRGDRDLYGRELKITIVALGDLLASAAELVMGQADEGTPAVIFRGLKPELERFEGPRKARAIIRSPSRDIFR

SEQ ID NO: 972 - protein, 558 aa, Methanopyrus kandleri
VAVFHYPHCENTASGITDVIKGHLGPNGAIEFVGVHGTSHSIAGLPEDVQKMEIQYCWEFLEDQGLGPYLRKDIISPSPEWIMDDTFVKVCQELGTREVVCGYRTWELDPDKHPRWYGKDYDYIADIMVIKKLNTNGYTVYVCPVIDFEELVGDVVDELGVYNLSNLKTMLRKAIETLRNTGAIRDGSHLMMWVLIHPWQLTEDIRVGRNDNTRPGMELIEEFIQWVKKGQLDYEVNGINIKFVLENPSDAIRIERNIEQNPTAYGHPMVTVTKLDWVSMIKASGGKTARELKHDHQKLVDIWERAMKKLQKVAPQLSSLRQTVDRLVYDVVLRATNEFRLSVMATKGDFWGTKYDATQYVQMWEREIQILEGADSGDDPVRGNRVGPGSPGDGVQAGRSDHQGTVPREQVVLVTDYPHGGASERSEDRLRGRLRGPDDPVSSDHPRMEDHRRRDRDQGPEGQRAGQGEVRSQQRSERGAGQGGEARGSRFVPAGVPGKDRGGVRETRDLADTESDDHPDDERYLHGQASSGVGIGRAQGEGHLGITGDVGGQLLGDH

SEQ ID NO: 973 - protein, 419 aa, Methanopyrus kandleri
VTTENCDVESVTIELLRDGQMVDRKTVSSPQGSVEFTVTEEGEYQVRIIVECTRGVTAETLTNSVTVRFPSASVSGGLSIESVSSSSAVLKVDYSVTTEDCSVESVTVELLCNGHVIDTKTLNSPQDSVEFTVTQEGDYTARIIVQCTSGVITEAMTNTVTVRFPSASVSGKLSIKNLGASSAVLEVDYSIATENCGVNSVTIELLRDDQVVTTKTVNSPQGSIEFTVTEEGKYKAKIIARCTNGVTIETLTNAVVVQFPSTQTPAGIRFDLSILSPLAAIAGIMLAWQLLGQPVQTTSETVEAPTIPNKQVTAKEVQKEGVEQERKTTNVPETEKIKEGKELGKPLSELRSREEVEKVRGAVEVGESVRSENGSSRRRGGTTGVLVIGKYVTGIPGVLALLAGVCAVVGAALIFRCRR

SEQ ID NO: 974 - protein, 403 aa, Methanopyrus kandleri
LHYVLECVECGSEFDDDSLVRCPECGGLLEVALRYDEIEVSRSTFEGRRLGVWAFRELLPVNTDDPVTMSEGGTGLHPCPRLGEELGVRELFVKNEGENPTGSFKDRGMTVGVTKAVELGAEVVACASTGNTSASLAAYAARAGLTCAVLLPAGKVALGKLAQALFHGARVIPVNGNFDDALDVVKKLADEGIVYILNSVNPFRLSGQRTIAYEICLQLDWEVPDAVVVPVGNAGNISAIWQGFLDLYRLGIIDELPRMYGVQAEGARPIVEAIRRGKEDIEPDPEPETVATAIRIGNPVNAIKALRAIRCSGGWAVEVSDEEILSAQRELATREGIFVEPASAASIAGLRKFVEEGEIDADERVVCVTTGHGLKDPETVMEVCELPEPVEPDPETIQRLIAE

SEQ ID NO: 975 - protein, 121 aa, Methanopyrus kandleri
LVVTPTEEEPSKDLPPERVFAYGTLTDPEMVVGVLNRLPTIIYPAVLEGYELALEDVGGRYNTIREREGSEVKGALLVGLSDEDIRAIDRYEGYPVLYERERVEVKTSLGSYEAYVYIARE

SEQ ID NO: 976 - protein, 600 aa, Methanopyrus kandleri
VLRRIPRPYTRTRPLLPPSGPSPVGTFDDHLFPRTRTLPHGSPGGTRPLARLMRLSFRLPSLRDCVLGWILLLGISALYSPHLTVYVTLPALASFVILLLDRLAKRDVPPNRWPFVGLVYAVPLVLSVPLGTVAVAVTKGVMSTFLTLALLGTVRSGVLRAVPVLAYLVIDSLALATLTGVPLPPLLLASLTGGVVGAAVVAVVDTLTLASLGIRTTDAFGEFLSFKSGRDHSLHSLFRGMETRTRVRVPVRVFAFMTKNGDVKGCFVIPWIHPGPLGDVGGGDLPGRIVRRLLKEGIVPLVFHSTTTHDFNPVDRREAGKIVEETVRLVREAADREGCSVGSAPVRGEETDSVGQILGDRLFLVLSKYPEPSDDIDAATGIALERETGGWVADCHNCFGDPDRGRVYAFSEDFWRLMRDARRISERVEPTPGLRAGFDHADPGLDPETGLGSGGVSVAAVEADGTRTLYVVFDSNSIVRELKEEVERTLRDLAEEVVVCTSDSHEVNPRGYNPLGQIMGRNDKRRLLKAVRCAAEGAIEDLEECEVVPVEGWVKVEVTGPGSFQRLVHSVETTRTVIGVLLPTAFLGVALLSLLFGIRT

SEQ ID NO: 977 - protein, 344 aa, Methanopyrus kandleri
VGLGRELRRIGLEPVFSSFGEGREMLMREFPDAPVYGLPKIELFSEDGSFDLLLLLRRHPDLPLRFYAGVEADRRVIRRHGCKVVVSDCQFHALVAAQIIGVPAIVISNMLRVPGEGSLVRLINGMLRRMFELADIVLIPDTYDDTYDVPEIDTEVVWVGPILKRRPDELPPRDAVRRKYGIPDDATVVLVTAGGSKYGRRIVRIAVEGLKLLSKSIDVFPVIISEERVGDGLGLQLRYVDNLLELIKVSNVVITHGGHTTLSECACLRTPVVSVPLPNHPEQHMNAERVLQRGLGVAVPPEELSPKRIAEAIEQAIDWKVPKIRMMDGRGAERAARIVAGTLD

SEQ ID NO: 978 - protein, 193 aa, Methanopyrus kandleri
LTSKELGRQLIHATFGLLFLLPLHMLGVYEFALLLLSGLIAGVSVSFALRRGLHVPIAKELVDAFERPDEMHIPGQGTLHFVTGLLLATIICPYTKVLDVTIIVLSVGDSASTIAGKAIGRIPIPYSSRKTVEGSLVGFTAAALASLAWTGDVVVSALAAGVGMLVESLPTPNDNVTIPVAVSVALGFWWGLL

SEQ ID NO: 979 - protein, 310 aa, Methanopyrus kandleri
LRWNLTVGVTALALILLVTALAPSYIPAACLLLEGGSRPKLVAFLGLLTAFSLGSAVVRKRPDPLITSLLLLVLPFTSNLLHCVAAKSIGVPPGSEFFVFNGRVLEGDSPLHTHIGKAALTWALERVCRISLYIHCGMSLVETYPTYVLAAEFVVVSLSVLLGVFNTRDPLSCLASSLLVLSSIDGGAFSLPYVHGSWLLALRYVREPELMIILLWFAALSPYCKLVLGTLLTHAYYGERWDSVRLQVLAGPLDGPLKSLGGVRCDGYYVLPVRSCAEWKEFLRNLEDSLRRSKVRWVAFCTFPNMAMYL

SEQ ID NO: 980 - protein, 403 aa, Methanopyrus kandleri
LTAITVLEKPGIRVKARVKQGRVSFEMEGKLASLLRPLKRLFEHLEEEKPAAVREDRIVFSLYLPPFPSRAFTRLLRARLKSEVLGRRVPEAVTMAVTQRCPCNCVHCSADRRRPTELSTEDWHRAIREALDLGTYNVTFTGGDPLFREDLPELIQAVDDDRAIATAFTSGYTLKDRVKELKEAGLYAIHVSIDSPDPEEHDELRGVPGLFERCISGIKAALDAGLLVGVSTYATPETVETGKVEDVVRLAADLGAHEVTIFDAVPTGRLLHEESVILSDEHREDLIDLHLRWNREKSSGPRVSAMSYVNSEHGAGCFAGYVQCHVTNDGEVTPCDFTPISFGNIREDGLKAAWKRMTSHPEWGKWRPHCRMQDPEVRRRYIRKIPPDATLPVRIDELEGDGS

SEQ ID NO: 981 - protein, 372 aa, Methanopyrus kandleri
MLLRVPYLPQVHSHRGIPLEAETVAIALTIILAAMALGRAAGMKFRYGILYRATRSVGFMDRWLEHTLLGPVLKVSVRASPILGFAGLAFAIYTLVKGASEGSGGFTVLLPGITLPLISGLASLAVILTVHELGHAVAARLSGIRIKRIGFFLVVVLPGAFVELEEEEFRRAPLRRRIEVLSAGPAFNVLTSFIAMGAVLGLSAIPGYVTSGVMVHGKMFKDVPLHTGEVIREVDGQPVKTIVDLRRALANHKPGDVVQVATDSGTKLVKVHEHRGRPVLGVYVIPNFGGYLVSEVMVALVMFLNMLGMLSLGIGVANLLPIKPLDGGRIVHEVLREVLDPSLASRLSTTVSIVALILLVLNLRAPYHVLGT

SEQ ID NO: 982 - protein, 229 aa, Methanopyrus kandleri
VDLREVRYTEEHWELLRTLRDRARKVVETLSQFGLEGWVHGSVARGDVRPGSDVDVFIPTPVSPHVVDAFMDAAPFEVVGVTAVLPTPRDCVRIKVAMEEDVEVTFPITPPTDRELEFFDFSGKLTPDSLERDERVPGVDKRLRMIEPKPWGHVEYSILGREGEVATKLGVSTQLIHERVRALTRRDKVGVQGVHAKVEGRPGEPVIELLRELGRRNPKAAEKLSELGV

SEQ ID NO: 983 - protein, 207 aa, Methanopyrus kandleri
LTKPVEPDDPRIRLLLAYVNRVKDRAASGGYSGVNRRQLTEVLQSIESTLQELRYSYLPPENVSERLKDLLPDLEDVVDPEEPELRWLVEYLEHADEVFEREIGDEADAVLCVVGEVGSVREHPNADNLYITVVNTGRFGKRTVVTNLTDVEEGDSMAVALLPPREFSGVVSEGMFCGEADGEPGEIIEPPERGEVRSIVLEWIEGV

SEQ ID NO: 984 - protein, 137 aa, Methanopyrus kandleri
MVSADDLTYREKLVLLALYEEFDGGPAGVKKLAPVVHMDKTKVSRALNALEEKGLVEFEHMEGRRLTDEGEKIAEEIAEEMELPEDEGPYQCSDCGRKYKHLRLKCAVCGGEIEVNKDHPDAAKAEWNLERARMGYL

SEQ ID NO: 985 - protein, 58 aa, Methanopyrus kandleri
VLTRILQVIGVGPEEITVYDKKWEQYRPLVYYANSVLAREEGNLSWESDRCSRTRRVT

SEQ ID NO: 986 - protein, 555 aa, Methanopyrus kandleri
LTKEHWSEVKAREVTEHCRKHADELPDEIVVASGASTSGRLHVGNARDVLTADAVARVLRERYHEDVRVVWISDDVDPLRRIPRDLDGRLSEDYLGVPYKAIPVGDEPYSDRWARNFVEELREFGAEVEWISSAELYTDNGFVKLVREVVNDYYGGGGRLASVLERFGLEDARVYMPVCEECGRIATTRVVDVDGWRIEYVCEGRHEIGDAVLEGCGHRGELDLRKPIEVNGFEIPPGKLGWKIEWPTRWVYLGVACEPFGKDHYVAGGSYEVGSAIAEEFFGFPAPVPVPYEWITLDGKAMSSSKGHYVTLSDWGEVCHREVLRYLVLRGKPLKHLDLDLRFGLLQAVDDYDELEKRYFAGEADERERRIYELSRVDEIPEECPPHVPFRFCAVVAQVVGIEDDVSEEEFERALEIFRRTGHLEAEPEGFGREWLRERLEKASRWVDRYAPEEARFRVREEPEPVELSDKEREFLEDLVRRLESETTKEDPETLQRTVFEAARTAGLRPADAFRVFYNVVVGKDRGPRAGTLIAAVGVDRISRLIRGCLEASED

SEQ ID NO: 987 - protein, 356 aa, Methanopyrus kandleri
VVRGAFPKGCRLCVCGAKLVVFVTGVCNRGCWYCPVSPRKKGSDVSFANERPIRSERDLVKEAELMDAEGASLTGGDPLTRLERAVNIIRTLKDEFGDDFHIHLYAPAESVREGAIEELDGVGLDELRVHPSPDSTVNRRAAEVLEDSGMDLGFEMPAIPGEENWILEVAKLADEYGFDFLNVNELEFTESNAEELRRRRFERVDDDLSDAVAGSERTALTALSEVANDVGITLHYCPSEVKDAVQFRKRIKRMAKNVARDHEEIDEEGLIVKGIFEVISGDPEDLADVLINILEVPEEWVYVDGSRVETKPFVVDELADVLSDLEEASRCEIRAWIIREYPTWDRTVVERWPVRG

SEQ ID NO: 988 - protein, 175 aa, Methanopyrus kandleri
MAGAGVSASREDIALRLRRVSRVWGAALYVGSVLLIVLIAVLGLGALGQYSYQAQVLLFGNYRGQLAEIDEKYQVLKTEFDQANHKLQALRDLYPISSADLHQVEKIRAKASLELQSLKLKKKDTEFAVYVLKDPATSDLKLKECMAELRRAEAAVKAFVRAVKGLEDKYAGRVH

SEQ ID NO: 989 - protein, 419 aa, Methanopyrus kandleri
LKVERHSGYLRFRLYGLIEFEVDPEEFRRMVTAVISKRERRTVPVTLQGTRVAAPVPREVLVGVLTDLISRLAGESGKNAYTGRRVYYITETTGIPLIGHTAFGLIDRGTNVIQVRPLSGCNLCCIYCSVDEGPISRTRSRDFMVDPDYLMEWFDRVAEFKGQGLEAHLDGQGEPTLYPFLPDVVQALKEHPHVDIVSIQTNAVPLSEDLVDELVEAGIDRFNVSVNSLDPKKARAMAGRKDYDVEHVKRVVEYIAQETEADVLVAPLWLPGYNDDDIVEIIGWAAKIGAGKRWPPLGIQNYLEYRFGRRPKFLRRVIPMKEFYRWLRELESRTEVRPLVLKPEHFGTEPRKSLPKPFRRGDVIRAEIVLEGRLRGEMIARAADRVIAIPDSAKILNVGDRVRVKVTRDKHNIFVGILV

SEQ ID NO: 990 - protein, 149 aa, Methanopyrus kandleri
MAEERSKDDIPDWWEKEWVEFRYRGYTLGELMKMPIEEFIELLPARQRRSLKRGLPSRHKKLLRKVRRARRLLRRGKKPPVIRTHCRDMIILPEMVGLTIAVYNGKEFKEVKIEPEMIGHYLGEFAKTRKTVEHGGIGATRSSLFVPLK

SEQ ID NO: 991 - protein, 224 aa, Methanopyrus kandleri
MELARECAPELKSGRVKEIYKTLKEMAERVPLKEYSEARCSLMVWVRAEEELPTNSIAQYVTSDTRYTFEVTVRQADSTSRPRIVEVILERHEARSRGPLDELKVHGSASVDEPVERRGRSLIGALKIALRYLREYDVEREWKVWKVTNKFREMVQKVTSLGSDEPGILVMEDSKVGTEYDGLFEYWVALKSGSIALSAVRRVLEVDRKLSLYGVHVEVPDARW

SEQ ID NO: 992 - protein, 483 aa, Methanopyrus kandleri
MIDVLLINPPDVTTKYQRFLGITAPPLGLAYIAAVLEEAGYTVKILDCPPLDMSFEDLRRAVRKLRPRIVSIMATTPIIHQAYQAAKVVKEELEDVIVCLGGYHPTFMDVECLKECPYVDVVVRREGEFTLLDLAKVFIDGVKTLSEVLGITYREKDDIVRAPDRPLIRDLDALPFPARHLLPMDKYTFFGAKTTATTMVSSRGCPVGCDFCASSAMHGHKLRMHSAERVVSEMAHVHENYGSDIIAFVDDTFTYDRRRVEEICRLIVESGLDVTWGCAARVDTIDRELLELMREAGCSVLFFGVESGSQEVLDNVGKGFTVEQTKKAFQLCREFDIVTVASAVIGLPGETHRSARQTIKFLKEIDPDYAVVSVATPYPGTKFYQEAVEKGLIEEKSWDKYTLMDPVVRTTELSPEEVKKYQKRAMIEFYLRPRYLIRRLKEDGIDAVRVTGTMIAEVAFKKMKALLAKIPSPRFSHRKGSDE

SEQ ID NO: 993 - protein, 328 aa, Methanopyrus kandleri
LRISVKAPLKAILAGEHAVVYGYPAVAVALDTYVRVTAEPGDDSFRVETELSCEGNVRAEITRDGNVKGFRSESLHEELTYVATAVRKASEEFDAPPSNLRILSEAPPASGLGTSAAVTAAVLLGLAEVSGVNVSREEIRRLVREVELEVQGKASWTDATVVTYGGFVRVSGREFELIEPERNPVLVVAHSQEPSRTGEMVRRVAELRERLDIVDGVMELIGELVDDLEAALRDGDLRTVGELMNANHGLLAALNVSTRALEEIVHVFRSAGALGAKVTGAGGGGCAVALFEREEDAKRAVETLSALGYEAFVTRPSPCGVKTEDSGS

SEQ ID NO: 994 - protein, 286 aa, Methanopyrus kandleri
LMLPKTLKPVVEDKYVESLEELADLIASADLRTGVVRITARSGDALLDAFIVVLNGKVVYIEVEEVRTGERWRGEEALEHLREILSAIEGGQSAVVDVFEASEDDIEMIFEYHGIRPKEIELEDVLPVPALEADIEFETEELEGAEKEEATEETGIGVEEIEEAYDEEPEAVESYDFTEEVEREPESLSREEILKKYGIKEPDESFVENILKEFTGVETDLRERISRVLRSYGITVFKVEGIVEVLLGNDTDEEEVVETIRDFMKDAGVDELEVRTYRPEWLGRKI

SEQ ID NO: 995 - protein, 435 aa, Methanopyrus kandleri
MSVDELPFDSVAVIGLGVEGRTCAARLAELGLKVYASDIREDVDVSSLERLPNVEVELGHHDIDRIRECDTVYFSPSIPNDAEIVREVRNIGVPPLEDLLTWPDSSKFVVVSGTNGKTTTVHMIDHLLDKLGIDRKIGGNAGGGFDGYATLYVRAELARPEVVVCEVCDMTLDYFSDRAPRYDVAVFLNLGLDHLDYHGSIERYAARAARFCDRARETAIVKCDGEERKVVERMESTPRCYDELDVEVDIPLRGEFYRLDAKAALLAVAEITSEPPEELAPLLSDFTSVPGRIKEYKLGEGRLVIGKTDNLSALKVVLRDYGPLDVVFWGTPRPGEDYRIEGIGRTLREAGVERVYVFPGLSEETVDDVIEELTSSGIEASPVEPSEVASKALELARRGRDVGVLGNGQDVIISIQHDVERAVRFLTAGSERSRG

SEQ ID NO: 996 - protein, 244 aa, Methanopyrus kandleri
MEVEFIRLADEIPECEFLIEGYPGIGMVGVIAIRHVVTECGAEPAFVMKIEDMPTAAIVHEGRVYPSAGVFVLDDLSFFYAEQADMRPGVVQNISESVAELSREIGVECIVCLAGIRAPDLEDEPSLYYAATSDKAAELFEGIAEPLKGGTITGVSGPLLLEGSLRGLDAVCLLVETPGTYPDPKAASRVVEALNEALGLSVDVSKLEEEAERIAKAVEETVQRLREQQRMEEEEAEPTERMFV

SEQ ID NO: 997 - protein, 129 aa, Methanopyrus kandleri
LKMLAITGVSFRVVEQLLTQGSTQIIVRSGNNLDAVVRLQPGDLVFVTTVGKRELKKGVSGVVATVRSVSVVHEHVVTGGDEHFEREFVAARLILNRVGSGRVREYKDCGVGRRVEVDVEMESAVSEAY

SEQ ID NO: 998 - protein, 199 aa, Methanopyrus kandleri
LVAYQQGGLVAFKLFVYPPLTAVPPVLPQIKPGEDELSVVRTLALFVSDTMQYDVGAEPPEYVPPVLRRAFAELELRGRWRGACGTASYMFSYLCRLYGIPTRLVLIEPTDTGTVVSGTGRERERFVLHAQVQVWVHGRWMTVDPSVGLVGTSDRPVQGHRVRPDGTELYTPGVKSYTVCTQGPLVFWDTLTGLVELIV

SEQ ID NO: 999 - protein, 559 aa, Methanopyrus kandleri
VYYSSLAEAFERLERISSRKAKISLIAQFLRQCPEDVVDTVALFLANQVFPGWDPRDLGIGSKLMRKVIATATGSTDSEVTELFKRLGDLGLTAEELLKRRKTSTLLDSRPLMVGEVRETFEKIAEVEGEGAVKRKMRLMMGLLARAKPKEARYLVRQALSELRTGVRESTVEEAIAQAFGVSRKLVERAHMLSNDLGLVAKVAMTKGEEGLREIDLRPMRPIKPMLAQAARNVKEALAEVGGKGAVEIKLDGARVQVHSDGEEVRVYTRRIEDVTHALPDIVEAVKDCVDADEFILEGEAVAINPETGKPRPFQELLHRIKRKYDIEEVRKEIPVELHLFDCLYVDGESLVDTPFRERRRRLEEIVREREGEVMLVEQVITDDPKEAAEMFHRALEMGHEGVMVKDLDANYTPGVRGKKMLKVKPVLETLDCVVIGGIWGKGKRKGLIGSYLLAVWDENKENLLEVGKVGTGMDDETLERLTKMFEDLIVEESGREVRFKPEVVFEVEFEDIQKSPKYSSGFALRFPRLVRVRDDLGPEDADTIEKVRRIYEEVLQKH

SEQ ID NO: 1000 - protein, 293 aa, Methanopyrus kandleri
MVMVERVVQALPEMEPEDFKVLRALELEMRRHDWVPFDRLLERTGLDEKELGYRLSRLDRWDMVVRTRRQTVGYLGYQLRPEGYDALALRALVDQGVLEGLGPEIGVGKEADVYLGISPKGAQLAVKFNRIGRTSYTKIKRYREYVKDKRHISWLYVNRLTAEREFEALLHLYPEGVSVPRPVAQNRHVLVMERFEGRELAETRVENPEAVLNRVLEEYEHALEVGVVHGDLSQFNIVVEGDDVLLIDWAHWVEVSHPSARELVERDVRNVCDYFRRKYGVHRHPREFFENSG

SEQ ID NO: 1001 - protein, 299 aa, Methanopyrus kandleri
MPIEIDMDSCLLCEACVAACPTGAIRREDGDMNHCIVCGACVKACPVDALELEDLEREVDGEKVELKRIAWKPEECHKEDPPQCGEVCPQEIMRIEDGYPELRGFCVMCLKCMETCPIDAIGMKGVVEPKSEPPEHPEDEDVYVHPERCVGCTYCLQVCPTDAIEMVPTDAEFFKAEENEWSPVYVDPDTMELKQGRKVAKIDPEKCTGCTLCAQVCPWGAITAARDVPVQSREVKNEIDEDKCVGCGVCAEVCPGDLIEVDGVAKVPEKCPACKLCERACPVDAISINVSYERSGEME

SEQ ID NO: 1002 - protein, 264 aa, Methanopyrus kandleri
LRVGTYLVDGTPRPAVFLDDEVHVYDLPVLEFIEVVHSDGLGDLDYSVYPLSELRIGPPVPRPPKIICFGLNYREHVEELREMGMDVPSEPVMTMKAPTAVIGHLDTVKLPREARRVDHELELAVVIGERCRKVSPEEARDAVLGFTIINDVTARDIEKREGQWVRAKSYDTFAPLGPWIETELEPDGLEMELRVNGEVRQRATTDDMVRDPYELVSFTSRVMTLEPGDIIATGTPPGVGPMEPDDKIELEIERIGRLVHYVGQ

SEQ ID NO: 1003 - protein, 433 aa, Methanopyrus kandleri
MDWVALDDTDSPAGGCTTHAAVLLRAELAEAGAEPVGRPLLVRLNPNVPFKTRGNAAVALPVEAPWSVDIEAVVLRALKKVVRKGYPETRPGLVVCEGEPPRVCESVYEEAVRRILNPGRVKESVDDDVNVVLEGRGIVGAVAALGFARVRKDHEVTFEGIAYRAEKYWGTERRVEESSIREFDRRTFPVTFDNLDSRDGDVLITPNTPCPVLYGVRSVEPDVLEVAPDMIKTREPVVEYEIFESNQATDAHLVRVDRLADAEDYSNPVLDLTVVEEPRRIPGGHVVVRCEDEEGVRVDIAAFRPARPLTEVVAALHPGDEIRVAGALRPETPKHPRTVNVEKLRVLRLERVEEVRNPVCGRCRRSMKSAGRKKGFKCSCGERAPEDSKIGVEVPRELVEGVTYEAPPVARRHLSKPEYLVELGLLEPSPLSR

SEQ ID NO: 1004 - protein, 64 aa, Methanopyrus kandleri
VVVGQKILASAVAHLLPFLVGAVGIYFILTASMKDDEHLRRLGFLIIVIGGPTSVLVSIAIVGG

SEQ ID NO: 1005 - protein, 325 aa, Methanopyrus kandleri
VRAELCADLEEALRAGGHEVVRIERACFDIFVRTRDGRAYIVKVLINADGLRREVAEELRRISHFLEAVPVVVALKRHTGPLEKGVVYHRYEVPVLDPLTFARLVEGEPPKAVADRGGQYVVIRADEVDELDVSRVRRRQLRREGGRITLARAEEADVEGVPVELKTPEHVDTGRDRMTRFERRVAELLERMGAERTGKVRRAPFKLLAKDGETVLARAEEGGDRESIALRDVASATGSMGVIVTRERCKDTYVPTIDIGTLEEIKDLEDLKEYLQERDPEERVRRLVEEAGITSPREIAQRTGIRESVIREFLRRMGITDERKV

SEQ ID NO: 1006 - protein, 545 aa, Methanopyrus kandleri
MAMLAGDGRQVLILPEGYQRFVGRDAQRMNIMAARVVAETVRTTLGPMGMDKMLVDEMGDVVVTNDGVTILEEMDIEHPAAKMVVEVAKTQEDEVGDGTTTAVVLAGELLHKAEDLLQQDIHPTVIARGYRMAVEKAEEILEEIAEEIDPDDEETLKKIAKTAMTGKGVEKARDYLAELVVKAVKQVAEEEDGEIVIDTDHIKLEKKEGGGLEDTELVKGMVIDKERVHPGMPRRVENAKIALLNCPIEVKETETDAEIRITDPEQLQAFIEEEERMLSEMVDKIAETGANVVFCQKGIDDLAQHYLAKKGILAVRRVKKSDMQKLARATGARIVTNIDDLSEEDLGEAEVVEEKKVAGDKMIFVEGCKDPKAVTILIRGGTEHVVDEAERAIEDAIGVVAAALEDGKVVAGGGAPEVEVARQLRDFADGVEGREQLAVEAFADALEIIPRTLAENSGLDPIDVLVQLRAKHEDGQVTAGIDVYDGDVKDMLEEGVVEPLRVKTQALASATEAAEMILRIDDVIAARELSKEEEEEEEEGGSSEF

SEQ ID NO: 1007 - protein, 88 aa, Methanopyrus kandleri
VIALRVEDVLKAGVLITFVGIVLTALAILLLAIKNASGRGEWGGVILIGPVPIVVGSSPKMALIVAVLALAMMLIMLFLMWSAAKGFR

SEQ ID NO: 1008 - protein, 274 aa, Methanopyrus kandleri
VGLFEKYVSNLNRLLILTMVFAVICAGSTLALGVKKGIDLKGGTMVILKTEKDPDTVTSEASRILGVSDVEAIRSSQGDVIVQVPKYLSADDVNKLARAVGGEVESVQTIGPALGRVFWESVKVAVPLALVAVSIVVFAIFRKPLLSAAVLGALALDLVDALGLMALTGVPLTLASFAGLLMIIGYAVDSNILLSMYTVKRRRVRRVDRAIADSFKTGITMVATTTAAACALFLLSMSEAMFEIAAVVIFGLIADVLNTWIFNAWVIREKIAGR

SEQ ID NO: 1009 - protein, 403 aa, Methanopyrus kandleri
LSGLGWMKENWRLLVITAVWIVAATSLAVKGVNLGLELKGGTMVIAKTDHPVSKKEMDQTVTVLESRLSTFGFKGIKIQPVGRDHIIVMLPGTPPKEAVELITKPGRFEAKYKGKTVITGQDIESVESPRIERVEGGYQWSVPFRLTAEGARKFAEVAKNAPGQPIDMYLDNKKVSSPRISEDLAMAAASGHMEREIEIVGGAKTKEQAEREAKEIMAVLRSGQLPAKLVPEGVYSVSATLGQNFLKMAMIAGAIAFAAVSVIIALRYRDIRISGPILFTGSSEVVFLIGLASLTGFTIDLPALAGIILSIGSGVDDLIVITDEIVRGERRKEEVTLRQRIKRAFSVVLASFATLAAAMAVLFVAGMGLLKGFAIMTIAGAFYGVVITRPVYADLLKKILGTE

SEQ ID NO: 1010 - protein, 490 aa, Methanopyrus kandleri
VDVKLVSSILGTVVKVAAVLPLLPLPISLLYGELDCIAPLLLTSLIMLVCGVALERIARVERHVRPRHAIVAVPIIWLVIPLFTSLPYRFCEHMSWLDAYFESMSGWTTTGLTVLPDIDHAHRTILFWRSLEQWVGGLGIVVSIISILRFETPSLLYVAEAREERIRPNVVNTAKEMWKIYITITAVGFLALWAAGMNPFDALNHSMTAVATGGFSTRSESVTAWHSPTVELITVVLMVLGATSFVTHYRVAKTFRTSPAELPKRIIKALRQYLQDRQFLTMIGLTAAVTAYAGAVSGDRAWDVVRYYGYQAVSAITCCGFSNADVLSFPEYAKLAITILMIVGGSTASTAGAIKVLRFLIMAEAVKAAIARRTQPIRGVVVPRIGSRVLSEDEISDAFAIASAYMFFLLIGTLLLTAYGYPLVDALFEVASAQGGVGLSSGITAPNAPAFVKILLIFHMWIGRLEVLPCLAALYWLTLILKRLAVKGRD

SEQ ID NO: 1011 - protein, 222 aa, Methanopyrus kandleri
MYVVVVGGGRVGRILAELLIAHGHDVVVIEKDKRRARELAQSELDVLVVQGDATDLDVLQDAEIETADVVAAVTDKDEVNLAVSLIAKEEFGVERVVSRVTDDRFVDVFRRLGVDAVVNPDRSAAQLIEKAITRHNLVDVIMFGRGEAELLEFEVTEDSLVSGKKISEIPADCVIVAIYRDDELELPRGDMEINPGDRVLVLALRDKLKKVEKLFKGRDEGE

SEQ ID NO: 1012 - protein, 656 aa, Methanopyrus kandleri
VAIEPMREVFVFCLDEKVSDLLKRVQLEGCLHVEDFWEAHGVEKFYGVKRPEVPQELMKLTDVLTRLARIEESLRRIHEEVRSTGLLDALKPMFKAERPETVEFELKPTEEIVEDANEFLEELESEAGEKLKRLNELKDELERLEEACSFLEYVEEDFNVSHLGEGPRVVARLYTVRADSWDDLVQELDGEPAYVGKVGETEDGDPIAVIAFPKGSGIESEIRRLGAMEEEVVNEVLEDREGSVQSVREELAEEIEEVKDELERTKHELAEFYEERGTEIRAWVELLENERELFDVLPKLAMTDRTYLIYGWVPEEEVGRFKEVVKEATDGLCEIVVHEPSDLENMPVRLRNPRFIQPFETLVEMFSLPKPTEIDPTPIVAIFFPIYFGFILTDAAYGAILTALAAAIRMGAGRVDESIRKFSEILLYAGIVTIILGALTGGYFGNLLGIKPLWVDPMKDPITILIVALGFGVLHVGIGLMLGMYVSLRKQRDMRSFMLDYLCWFLILLGGLLLAVAYKTGGIYTPLGYAGIAIAGLGFVLVLAGHKLLGVLDTIGFMGDILSYSRLLAGCLSTAGIALVVNLLAKMVEGLGVVGYVIAGIILIGGHLFNMAMNGLGAFVHSLRLHYVEFFSKFYEGGGKPFEPLELKGEHVEIRA

SEQ ID NO: 1013 - protein, 1021 aa, Methanopyrus kandleri
MVSTELTIAAIGAGLAAGVAGVGSGIGQGIAAAAGAGAVAEDEATFGKAIVFSVLPETQAIYGLLTAILIMVGIGLLGAAKAVTVGAALAALGAGLAVGLAGISGIGQGIAAASGIGAVLKDEALFGRAIVYAVLPETQAIYGLLVAIIIMVGSGLLGGAGGKVSLGAGLAAMGAGLAVGLAGTSGIGQGIAAASGIHGVLRKEELFGRLIVFSVLPETQAIYGLLTAILIANFVGLLGGPTSVSVGAGLAAMGAGLAVGLAGTSGIGQGIAAASGIKSLIEEEGVFGRAIVFSVLPETQAIYGLLVAILTLFSLLKPDLSLAAGLAALGMGLAVGIAGTSGIGQGIAAASGIAGVLRKEELFGRLIVFSVLPETQAIYGLLTAILAMFFLGAGKPTLAAGLAAVGAGLAVGFGGTSGIGQGIAAASGIRAMIERAELFVRGMVLSVLPETRAIYGLLIAILALFMMKSGSVGAGLALIGAGLAVGLVGVSGIGQGFTAATGAATLVKNEGFFGRAIIFSVLPETQAIYGLLTAILIMMFAGILGGAGANIGLGAGLAAVGAGLAVGLAGSSAIGQGIAAAAGVGASAEKEELFGRSVVFSILPETQSIYGLLIGILLAVFAMKAGSPVGAGLAALGAGLAVGIAGFSGIGQGIAAAAGIGALKRDPGSFGRSLIFSILPETRSIYGLLVAILVMVGLGLMGGTFSGNEAVGLAALGAGLAIGLAGLSGVGQGVTAATGISNVVKDPGMFGRSLLFSVFPETQAIYGLLIAILIMMFAGILGGSKSPALGVGLAALGAGIAVGMAGTSGIGQGISAAAGARATAEDPGNFGRSIVFSILPETQSIYGLLAGILALTPVLTGAGAHLAAAAGLIGIGAGLAVGVAGTSGIGQGIAAAGGTGALAERTEMFARSLILSILPETRSIYGLLIAILSMSLTGVLGGAGKASLAVGFAAVAAGIAVGFAGLSGIGQGITAARGSASMVRREQVFGKSLVFSVLPETQAIYGLLTAILIVFAALAAS

SEQ ID NO: 1014 - protein, 200 aa, Methanopyrus kandleri
MGVEELERKILEDAEKEAEEILEEAKRDAERIREKAEREAEEVRREILDRARREAETRRRREIAQAKLEIRQERLRVKEEYIEKAIERAEEKIRELAEEGRKEYLEFLKRSAIEAVNAISSDEVVLRANENDLMLLDEMLSEIRDETGKDVELGEPVEAVGGVIAESKDGSEAYDNTVDARLRRRRSEIVRRVSETLFGG

SEQ ID NO: 1015 - protein, 374 aa, Methanopyrus kandleri
LLGLAGLQDYTLLAVGIIALVTVLSIILSIPITDVVWRYAPYAYPLPRAKAVEAETLSDEDYEELKDAPVRDLVTRLEELGVEPEAARAVLDGNTAPLEIELKRRAVESVMERIVETSPEDVSELARALIAKYELEDIKAVLRARHAGEEPKHLVDAPVLLGAETWRELKEARSVPEVVDYLRGTPYDRGLEEALREYEETGSLLPLELALDRAYYEHLWDLVVSEKVDEELARLVGLEIDLYNVEVALRGAILNLDPERVLEAMAEGGWELAEWRKRELAEAEDPLEVVERLSGTSLGPYLEEAAEEYSEGRGVQVFDEALRKARYELAREIAGSDLIGAPAVVHAVYEKQREVDNVISLVNAKVADVETMLV

SEQ ID NO: 1016 - protein, 112 aa, Methanopyrus kandleri
VYVVAAVVNGSVASGFRLVGVRTIDADREDPKEAVKKLASDPEVGVIILTEDVAEKVKEEVEEIQREKVSRGEATPIFVTVPGPEGPTEEFEIEEIVKKAVGVEIDLERIER

SEQ ID NO: 1017 - protein, 592 aa, Methanopyrus kandleri
VSNSVKGEIVKIAGPVVEAVGCEGAKMYEVFRVGDEGLIGEVINIESDRATIQVYEETTGLQPGEPVKGTGELLSVELGPGLLTQIFDGIQRPLPEIRKEVGDFVERGILVSALDRKKKWEFTPKVKEGEKVEEGDVLGTVPETEFIEHKIMVPPGVSGEVIEIAADGEYTVEDTIAVIEDEEGEEHEVTMMQEWPVRKPRPYKRKLDPEEPLITGQRVIDTFFPVAKGGTAAIPGPFGSGKTVTQQQLAKWADAQVVVYIGCGERGNEMTEVLEDFPELEDPRTGRPLMERTILVANTSNMPVAAREACIYTGITMAEYYRDMGYDVALMADSTSRWAEALREISGRLEEMPGEEGYPAYLASRLAEFYERAGRVVCLGSDDRVGSVTVVGAVSPPGGDFSEPVTQNTLRIVKVFWALDSKLADRRHFPAINWLQSYSLYLDDVEKWWHEEIGGDWRELRDEAMEILQRESELEEIVQLVGPDALPESERLILEVARMIREDFLQQNAFHEVDTYCPPEKQYEMLKTILHFKERAEEAVDKGVPVDEILKLDVIDDIARMKVIPNEEAKEKIQEIRKKIDEQFEELIEEAS

SEQ ID NO: 1018 - protein, 203 aa, Methanopyrus kandleri
VREFLVLFNHAPTSPDRVRLKDLPGSGRFDLVCRVTTQALLYSHGVRTDTVVHLLLRGPDDPPKTITVTGRRVRRLYPDERTTAIHLRRALEADPDTEPHPGIFVRRADLEDLLGEMKGAKLYYLSEDGRDLEEVEPEPDAVFVLGDHEGPTPEQDRLLRRHADAVISLGPIPYHADQCIVILHRYLDVKRPPEYAHGPSNVM

SEQ ID NO: 1019 - protein, 101 aa, Methanopyrus kandleri
VAVVMEISFYPIGTGSPSVSDEIVEVVKALKEAGFEPQVGPMGTVVEVETFEDALEALRVAREAALRVVDRAVFVVKIDERRDKELTAEGKVRSVERKIQE

SEQ ID NO: 1020 - protein, 340 aa, Methanopyrus kandleri
MLTVFLLALLISPVGCSGMKLGAVWISRESGYTHHLFLVDNASGALWYLGTDASPGPRPWVLERTLRKPEPLIPGEVHPDALGAVVIPFKPGEWPGVALCSDPTTAATFRRLLDRPELRTILNGPVIVTTEVQGRPCCIVRRTPDGFEFAFEDGTDADYNDAVIEVTLEAVVVSVGELKISIKRESPEEYDVLLLDRSTGSVIRITPDGEASPIIGTLDVHPERLGIALKGEDTVLCSDAETAEVLRKLAEESPELRAFLDGAIIAWTTEVVGRRVDACRGSTKCEHGVWYLRFGFEDGWDGVVDYDDVIVEITGPRGNFNPLSVLPLILMPRGRNPWRS

SEQ ID NO: 1021 - protein, 252 aa, Methanopyrus kandleri
VTVLVSTLALGDWWADPERVNELPELTGSDGVELILEGSFQPGRLDPNELNVEVSSVHAPFADLNPASPSDHHHEYILEVIQRAAELAAELDAHYLTVHPGHLTPVTIHDRELAIELAIETLGELADEVRSFGVEPLVENMPDHSLLLGTSADEMEEILRASGCGFTLDVGHALTAEGSLRPYLRLRPDLLHVHDNSGDGDEHLPPGSGILDFEELRRALHHRVLPVVEVRGIEKAREAVRTVREIMERPEN

SEQ ID NO: 1022 - protein, 66 aa, Methanopyrus kandleri
LEGKDKPVDVGDVYEVKIEDTGKRGDGVARVNGFVIFVPEAEKGDKVLVKIVSVRDTYAIGRIVEI

SEQ ID NO: 1023 - protein, 207 aa, Methanopyrus kandleri
VSSEIVLEHDVLTALREGGLKTPRFTVLERPEEASDVPFDPPYTVKLLHSGVAHRARVGAIYTAVPSKERLERRVAELLERWPDAVGVIVQEHLDVVKGIEAFLGIKEDDTFGTVVLLGLGGKLVEELRAYIVRRPPVDGEDVERGLRRVPGGERLLSEIGPNRLAEVVNAAHGVYKEEGWSELDVNPLLLIDGEAIALDGLARKAD

SEQ ID NO: 1024 - protein, 379 aa, Methanopyrus kandleri
VGPVSADWIPDSPDELFRKIHSGEVIELGQNTNRLGPPEEVRRAVVRAALEAPYNVYAHPQGDRRLREGLLEYFELDDDFDAVITNGAIEGVHAVIRAFASNGVAVTPDPGYKTIDGMMMAEGVHVQEVDIYSEEFDYQMTVDAVMEEFDGNLRELDLIFVINPSNPLGSSMSERELRGLVELAQDADAFLVHDCTYRDFAPEQPVACEMDPERCVDLYSFSKTYGLAGLRIGAVIGERKLLEQVSKYKVSKLGINLIAQEAAITALKVRDRWIPRLLREVTRNQRLIKRECEGDGVKIPVYPSHANCLVIDFSEYGYIDSKTVVGKLYSEHGIFVRTGYYTSPRRGKGFIRVAFSAPREDIERFCEAFNEVMGELIKS

SEQ ID NO: 1025 - protein, 171 aa, Methanopyrus kandleri
LCKYRKVLGVSRSRLSGRARDILELVVNNSGITVSEISRRLGLHRSTLDRYVKILKDLGLVETKPGRGGGVYPTKDAVLLVRSGGRVTIVRRGGGRARILIEAEDRPGLLADVTNRLASAGVNILETELKVEEGIAIMEFEAENVVHEEVLQELDGLSGLIRVEVEPRGRK

SEQ ID NO: 1026 - protein, 329 aa, Methanopyrus kandleri
LPLTPAEALLEILGTANVLVPRSYKPGKATGRAAVNRFALYAVRKGLGFEVEERPVRVYTSWRGLSLAVPGEETTSDYRATPRGRDVPPEELAEAVPDYPARPHFVVDYRFWGEHSDFGRTNLIRQTAVTASTLRLYLSDRHMSLVNVTPEAEERFLNAFPSFEGGLYEDWEDLIAELSVDRVILLDPNAEEELDENEIREDAVFVLGGIVDENMRGWTAKLAPGIPCDVERRRITLRGSIIGVPDRINALVEALSRVIVEGESLERAILRVQSPRFARRRLSRELRRLDRLTEEELRRLREVVNLPKREILLEARRRGIELKVDLQDG

SEQ ID NO: 1027 - protein, 316 aa, Methanopyrus kandleri
MAELGYEKAERCEVGEKPACKVGLRDGKRLIHDAHLSRPEHYYSVYQSCCNWECLFCHSWRFTQRPVGTWWSPEDFVRHALEYRETVTVWEPRSRATSFHATDLCLGCGRCVTLGERPEWCPGELDPDQVVPSPQGWGPARNIVAFTGGDIACRPEFYVESIRGLKSETDDLWVLLETNGFGLVRENVEELVAAGLDAVWLDVKAWKEDVHRKLTGATNRYTLKAIELLVEHDVVLEVCTLYIPGYVEADQILRIAKYVADIDRNIPFTILAYFPEYKLSVRPPKRSELETAERLAREVAGLKNVKIGNEGVALPG

SEQ ID NO: 1028 - protein, 154 aa, Methanopyrus kandleri
MWGCSKGLSESEIRCPCICNGKYPAPALTVDGIVPYRGGIVLIRRGKKPFKGKLALPGGFVECGETVEEAVAREVREETGLKVRPVELVGVYSDPGRDPRGHVVSVCFRCEVVGGELRAGSDAADVKVVDPSDLTPDDLAFDHYDMLRDAGIVR

SEQ ID NO: 1029 - protein, 205 aa, Methanopyrus kandleri
LKRGLKIAAYVAGGLLLCTVSANALLGMREPPRFAEIDNPSLGDRVFLAISGLVVGIMGVSRGIWELRNVERVRAALGLLKKAERYLEEGSERIPAKYNAVTYALRALRCVKNAVEILEEMEEELESQERELKEKAKEKEKAEKEGEEEKVEKRGSSDVRTAERRDGAGDENSDDRRSRGDGTADRGRREEDRGVSDGGGSEGSG

SEQ ID NO: 1030 - protein, 253 aa, Methanopyrus kandleri
LVEFRAYQEEARYFKYAFNAAGKVVEEAPLIVTENGIVSRAMDASHIAMAVLEMPWEMFDEYEPPSDELMYGLDMEEVTRIVRRARVTDEITLEGEDEEEVIIKLGSSGYEREFRLRSIDIDDIPDEPELDFAVEVTVVPDFIQDAVRDADLVSDTVKVGAKGNTFYFKAEGERGRVIPKVQEGAEALLTFEVEEDVETAYPLDYLKDMIQAAQGAESVRIRLGQDMPLELTFRIGPAGEGKLTFYLAPRVEE

SEQ ID NO: 1031 - protein, 155 aa, Methanopyrus kandleri
MGWSALNVKRAWRKVRELRGWKAAVFYVVLGVALGYGLRYGLGFVLGTPDPVVTVISESMYPYYNVGDVLLVVGVPYRDIKVGDVIVYRLPGKPIPVVHRVIAKTPEGVITKGDNNPLPDPWCPIRPKEISGRVVLRIPYVGYPKALLDRYLYGG

SEQ ID NO: 1032 - protein, 316 aa, Methanopyrus kandleri
VVEEDVVEITSRYLRRDPDKIAEIYKAIGIETLSDLAATDPATISDAFGVKESTAKKIIADAREEASKGIMEAKTLADLLEEEKKRDVIPTGIQGFDERMGGGLPTGVIVGMYGPPGAGKSQFATQVAAHALKEGESVLYIDTENAFRPQRLLEIGGFKKDELKEVSDRFVLRRIIDAAALRQYFDEKEGEFISEAYELTPKVVVIDSISQPFRPYSARDKLPERSRMIAHILNTLLKYCTAYNALGMVTTHVQANPDAWGKRWQDVAPTVLKHIATYRFSIDYKGRTERVITLEDAPDKPPFEVQVELTDRGLVG

SEQ ID NO: 1033 - protein, 279 aa, Methanopyrus kandleri
VDRELVMRFLGTGGAVPSKDRSHPGLLVEFSGTKLLIDCGEGTQRRAMEQGVTIHDVDAVLLTHHHVDHVAGLLPLATTVDLLHGRRLKVYGPTAGSESALDISDLEVIEYREVNPGDEVEIGDLRVLVYESEHGVPTVDYRIETPKIPGKADPKYIRRVPPSKRREVLLRGERPYSLTKPGKISVYVKGDGRPADPENVRGCQVLVHEACFEDHEEAVRYLHSTHLEAAEVAREAGVDLLVLTHLSTKVDPERMREEAREVFPVVVVARDGLMVRVRR

SEQ ID NO: 1034 - protein, 484 aa, Methanopyrus kandleri
VEAVVLFPAGPRDVIVGGGNLFEASRRLYERALSDPSALGEASFPTLDAIIRFVLYEEGYDPREITLISLGTRRLDHQYGHHPEDTEYCARLVSLYAEKEWGVRVEDPVVLRKDPDRFEVFREIEDVLKTLHRREDLKRSELYAYVGGAHPNVGWAIRLIGATLWEDRFHPLRVLDENVEVEPSPLILPMKTMKCVLIEHGLFEVAAGIAERFSAYEDRMEPVYLRARDSELNFNYEEARRLYAEVTRSAHLDELRHEARRRLRKLREAEKDPIRRIIHHMRVVLENARYQWIRGEFGDFIVRLSMLYENYTQACFMLLYERLSGERVTTSDPVELASLLADLLGSSEELSGAVEDRLDSDIEAVLRELRGEEGEGRAVLAFLHVAQKVLSGALEVGAVEKDVFGPLSRYIQVLSCSELRKARHLFAHEGRGVSREDVERIVKAMARPCRVNFETIDELLSFLEEGIDRLELAVSEVRGTDRGP

SEQ ID NO: 1035 - protein, 910 aa, Methanopyrus kandleri
VTEGFEALPDDVQRVVYSRFDEPTPPQRVAIPEIMDGKNVLVIAPTSSGKTETAVLPVFSMVRELDEPGIKALYITPLRALNRDILRRIRWWGEKLGLEVAVRHGDTPQSERRRQAEDPPDVLVTTPETLQAILPGKRMREHLSHVRHVIVDEVNELALDKRGVQLTLGLERLAEVAGDFQRIGLSAAVGSPDRVGKFLVGDRDVEVLEIEAERYLDVSVAHPTGPHEVKERLELIHELAKERDSVLVFTNTRQMAELLATRLKTEYDDIEVEIHHSSISREKRMEVEKRFKKGEIDVLVCTSSLELGIDIGHVDLVVQYGSPRQVTRLVQRVGRAGRRRKRAEGLVITSNPDDLAEAAVICRRALKGSLEPTEIPEGCLDVLAHQLVGLCLDGHQVTVDYALEVFRRAYPYRHLDAETLREVAEFLDDIEVLRVRGDRVYRTKDAWKYYYSNLSMIPDERHYRVVTESGGHVSVLDEPFVLEYLRPGIKFICAGRPWIVQDVDHDRYEVLVTPAEAVEGAIPSWVGEEIPVPYEVAREVGEGIGRAEAALEDGFTEAVEVAAETFGLGRREAKVLADLIRRQREHSAVPLPERPVIEDLGGTLVIHVYGGTNPNRTLEKVLGTLISGRLGTTVRTYSTPYKIVISAEKRAGLDADLLMECLETLPSDERGFHALTLRIVEKSEVFKRRLVHVLKRFGAIEPDADYRDVSPRRLLKAFKGTPPYYETVSEVERDLDTSVAFRLVKELEEKAEIVRVRDPSPFAEHVLEGLGEVGRVTSGLLAAQVETLKRDLERRKLWLGCPNCGWRGRRSVKTVKEEGLECPDCGATYLVAAKTEEGLEKLLKDSERARRVADLLESYGAKALEALAVPGVGPEAAAKVLRSTGGREPHFYRELLQERLRYLRTRRFWD

SEQ ID NO: 1036 - protein, 319 aa, Methanopyrus kandleri
LPALVLIIAVSIAMTPAHGRVGGFVSGHYYLDPEFDAPNTSFGSDIDGDGRVDRIWCAEACAVDMYNLGVAMGWWNGDPVTPLQYEISATGEHDDDNLDIIDAFQAIAGSDAASKVFEVAVVSLLNRPSVYHAVLVLGAVQEGSRRYFVVDDESTSDVGELLLVPYDLFLSNLHPGILEFFGPVEVVNRLYSVLSGAISPLTVIVSSKRGRTLTVVLLTDLPGDSLAAFTEELWKAALEGYPVAVAVSKPFLDLGGVTRIRCDAPVTGDVETRRPLNGVESGEGPSPPLGIPIPFIGTVGIAGLFFLLLTFLGLSYLPV

SEQ ID NO: 1037 - protein, 188 aa, Methanopyrus kandleri
VFNVVDPSDLVTEGVPGPTKPVMKATVLAVLRPRPGERILEIGAGSGSLTLELARAVGPLGRVYAVEGDKEAFRSLERNVRDFCLEDRIEIVRGWAPEALEDVDEVDAAVVSGSERLEEVLLALAERVRRAILLNAVTPETFATAVKALDGWRRSCLCMVWGEGKVLRRGTLFSGMRTSYLALFEPER

SEQ ID NO: 1038 - protein, 220 aa, Methanopyrus kandleri
LNTGAPTLYGVGLGPGDPDLLTRKAIRIIKKVPVAMVPFVGAESRAARVVRAVDPEATVVGYHAPMTRDPEERDRAYSKAAETLAELLERFHEVAVCNLGDPTLYATFWHIVERIPLEDFEIELVPGIPAGLLCAARIGRPLAMESDKVLICTREPPEDLEGMDTVILYKPTRRGVERLLREGFEVYACRELGFEGERVERVNGAEFEPSYLCTIVALRP

SEQ ID NO: 1039 - protein, 830 aa, Methanopyrus kandleri
LLRTVWVDYARKGEPDVILVGRREDGNPAALVVKGFRPYFYAEVEDGFDPSEVERLSGVVEVEEVLLEHPYGGDRVELLRIVATYPKVVPKLREQVKKLDGVKEVYEADIPFVRRAAVDLNLPPASEVDVSDLDTGSWSGLPAYFADVEDARELDHRPYPIEDLVVASFDLEVLAEPGTTIKGASGPIIAISFAYSTPDGERRNYVITWKGEDESFEVDGVETEVIVCRSEAAALRRFFDEFRRVDPDVVFTYNGDEFDLPYLQHRAGKLGIDVSPLARPAGKRGIILKHGGGRYASDIFGRAHVDLYHTARKNLKLERFTLEEAVKDVLGVEKEEMELADINEAWKRGNLDELMRYSAEDAHYTLELGLELAQVELELSYLTRLPLPDATRFSFGQLAEWRAIYKARQEDILVPNKPTRDEYKRRRRKAYKGAIVFEPEIGLHENVVCVDFASLYPNVMVAHNISPDTFDCDCCPRVTVEEVDDPTDATVAPDVGHKFCKRRKGFFPRLVEGLIERRRELKRRLRKLDTESHPHEAKILDVRQQAYKVLANSYYGYMGWANARWFCRECAESVTAWGRYYISEVRRIAEEKYGLKVVYGDTDSLFVKLPDADLEETIERVKEFLKEVNGRLPVELELEDAYKRILFVTKKKYAGYTEDGKIVTKGLEVVRRDWAPIARETQRRVLKRILADNDPEAALKEIHEVLERLKSGDVDIDELAVTSQLTKKPSEYVQKGPHVRAALRLARHLGVEPEPGTIVRYVIVRGPGSVSDKAYPVELVREEGKEPDVDYYIEHQILPAVERIMRAIGYSRGQIVGETASQKTLDQFFG

SEQ ID NO: 1040 - protein, 546 aa, Methanopyrus kandleri
LRVAILDGYTDEPAGLGVPPYLGTHPRYAYGAARAAGATEVRYVPVERVRSGDVDLNRFDVVVGICGVHTPGKYLGARPADLSEMLRILSEVDAVTVLGGPAAQSGHGRVGGELPETEVEGVDVIARGDVEAVVYDLVSEGSPEAVDPDRRRSIEELREYSVKGAPAAREHVDYPDAVIAELETYRGCPRFLSGGCSFCTEVPRYGEPEFRPPEDVVEEVKALYKVGVRRFRVGRQPCVFSYMAEGIGETERPRPNPEAVEKLFRGICTVAPDLVTLHVDNANPAVIAEHPVESREIAKVLVRYGTPGNVVAFGVETFDERVARKNNLNVESKEEVFRAIEVVASVGGYRGWNGMPYLLPGLNFVCGLIGENRERYRRDEEVLRELVERGLRVRRINVRNVVPFPGTEMGEHGTKWLERNRERVAAFKRFVREEVDPVLLRRVLPKGTVLRRLRVEPREPEFARQVGSYPVACRLLAEREPGEWVDGLVVGHGARSVEVIPLPVRREDGPDVLAKLPGVGKKEALDAFLKGRRPRVPYALRSWFAF

SEQ ID NO: 1041 - protein, 1586 aa, Methanopyrus kandleri
LPWTIIDALAEALASTKRVVVVATSDPERALVVIRGRPVKAKVAVAAHIWLCLTAGDTRALVTFLLWLADPSFPTDAVEPPRTIVRTALSAYIPGTGWIGGIPHFDTASFRDWLRRLARGETEGTVVLFGFRQKLPSWAVDVLRGMDLSAFASRLPNDLVLVLAHGIDAVGPRRDAVLRLTEALDDVTSRYGVRTVAVFCESSFVKPVEVLSGLERQHKRVEALISVRAFTLNFPKPAEYVVIRLNTPVIQVVFPFTGDASMGLGEYATNRAGPSLEWTYQVQLGSEREGSFWYRVLWLNGKDDEPVLLPGTLDDLGRLVDHILRLRLLPDREKRVALVVYCYPPGRAELGAAYLDVPRSLARILARLAGEGFDLGPGTEFFRELYRAYREDPREARTLEDVFVAVFNAMSSAVDPHDPRRSVLLLANVGPWAKGELRRMFDLYEGGYGEWSLNVDGREVEIEVRDGKVTVSVDGRSFVLCSISRDQLIPAENVREWFEEDVVRRLHAYLDLVRELDPEAVRAAVEGMIEGFRRTWGDVTDNRGIMTDGRRYLVPALRFGNVAVVLQPVRGWSGSPEAVYHSRELPPHWQYIAAYEWLRRVFHADAVVYVGTHGTFEFLPGHDRGLTVTDWTHLLLPDVPQAYFYIVSNPGEGTLAKYRGGAVILTYPSPPSGYFKDFRKYAELERLWSQYVSSSIYGGDPAVRKVIAEKILKKARELGILEDVVKSIFAERGESPPEDPESWAERHLEEFLDALHDYLLALRDEKSFYGLHVIGEDLPVELAVEEAALLFAPRFAPYLAVTTGLTPKADLELFRRLADENPDFYQDVKIRTYELLRSMLHEIWNDPYLRSVLLQWVELKDEGELRDDASLLSKADTILQRFKLNLLGLYRQSLLKIGLWEVTNQYDQDIIKLIAEAFREFVHVYESGEYELDNLVNFLRGGHVPTGGFGEPLWNPKAYPTGRNGVPFDPYTLPTPEAWEVAKRLMDDFLARYYRVYGRWPETVPIVLFASHELTSGGLGIAQVLYLLGVKPVWDPNSGKVLGVELIPLDELKVKVGNRWINRPRIDVVALCTAVLDSIEPVVQLLAAAFRLASDAEEPLAYNHRRKHYLELLKLGVPEPLAATGVFGEPPGDIQGTGVNRLVELGWSELTKGLGIDGAGTVDARFSEKIAEIFESRVAYAFTVTGNPNGSKLLREELTGYEAAVKAVKVFRYLASTVDAVIDQVVNAFNVIDVNDYYSWIGGMVTYVRLIRKKEPLVFLTVARDPTTAHVQTLAERLAIEVRTELLSPSWWEALMAHGPDVGWHEVMKRVQNIVGIAVTTTQVRPMVQTLLTEVASTILSALERYRPSTPKGWAEVQSTLSWLVEAVRVGLWKPDRNTLKALVRAWAEVTARYGPSTCHHTSLNPSTVPFVRNLAASLGLNDVLKMLPDIVRAYRTLDNPKVVAEMIRMIVTRSRASYRAVEPRSVSPRSLRAVEFVESPRANNLEVGNLPSGSVSRASELVSTTGVIFHGRLPVGGAISTGGTSGSGCRAVPLKSEAAKESEARAMVRESAPAPRVIWEWVVGLLAASMIVVLWARRQFRRWNW

SEQ ID NO: 1042 - protein, 78 aa, Methanopyrus kandleri
LSTTPLPNAEEVGRELGIPVHVHRIPKDPTSIGNLDWDGISRDVRSADVLVIQRMGTVPTAFTRELSRRTLGTALDDN

SEQ ID NO: 1043 - protein, 283 aa, Methanopyrus kandleri
VRFYFAVDKARERGVPIKEFKLIQEDGSVYWEGKFGRSKWETSGEVIYGNMVALSGIYLGLLSGEVKPKTWPEPERSRFEKGITVGLARILSLQQEDGGWGWKVVLVEGKTRFPAGKGHVLYTAKILAKVLIPALRLNIKNVSYGGTTYDVAEHARAAVRFLIDQQLESGGYSANKEWSMTEDPLYTAWALRALCEAYRYRDLLGLDDATVQQVKEAIRRAVDWLLSHQEDEGDYAGLWEMKSAAIMGSAYAPPSEAQIVRALIQAYSISEELGLNKAELKEA

SEQ ID NO: 1044 - protein, 160 aa, Methanopyrus kandleri
VDWALKYQDASLVEFDGRKVLGWAYSSTRLESCGPYLGYTALIAATLKLAQELGLGSKAVEKMRSVGVTLEDEAEWVAHEWQEIDGLGYFLYPNSKAEHKTVTPSSQLYGLTCAVAFSHPEVLLKRTTADVWKLVPKKGAWKVPVWPVVTVVLLFACRRR

SEQ ID NO: 1045 - protein, 505 aa, Methanopyrus kandleri
VRFPALVIGLLVALGPTAASESPKVAVVMPYHGSYDPHWIYMAHELPEKVQEILSVTYDEYNIQVYPGSFETYDVTKVRLQGGKEYVIHQEEVNTGEEVLKTELGHALKEAEEFTNSGRDGLIVVLPAFVNRGGQHQCVEIPEVIDIILGDKVPKYSVHYEPFGITNWDRQNDIGIVPELLFRNIQTEAEKTLTGPNGQGDPEDVFSAYKDKRLLDFLVDHKDEVGLLEIMFGTLRVGYWDDFKANAMYVLRGVAERLGNLLGTTIPVGEVDWALENPFVREGKAYFFAFQNPEIGPENWEKSRWEVRYEQFQKLMQSLCRQGVRYVVAFPYITVTGITDRKLFEGNPEHGPEGDEPEAYDYPEAILRHFGAELVAETVADVRKYTYVQEGQEKTRTVYINARIYRIPKEKLGTDADMYVIYVRRGLLDAPNATEKVARVYANYIATHLPTWLMEYEAVKGMKEGFEGEINSLRKDVKSLKKRKVAVYPAVIALALAMIPPLRRR

SEQ ID NO: 1046 - protein, 228 aa, Methanopyrus kandleri
MAVMDAEARSQGLPLAELLGGEPRTVESACSVHELGKHGALREARDNLSVGYTVVRVRADSAGLSSVSALDFETVLLEFTDRPSERALEEVRSVSDAEIVVISPEEFDAEVPIYVRVTSEEDIHGLGSAEGVALSVQEVGFLDAVLLGRKARELGFKIIVLTEVESAVSVKAAAHLAGALRAEYCDLSGHLALYEDLESLGYAPEVELTGPGREVRVNHDPYELAEAP

SEQ ID NO: 1047 - protein, 470 aa, Methanopyrus kandleri
LKRVIVVGAGSAGRSVARLLNHVGYDVVINDIRDWEDFTTEEREYLEVLEREGVEVALGGHDRELFESADAAFVSPAIPEDAEGRKLAELVPEEITVEDVAGLLGDLFPVPAIGITGTNGKTTTTWAVAHLLEACGYEVWRCSSLDRHLVIEAIVDGVVTGEIEGYDVAVVELPHGTIRLAAGIELDVGVLTNVSPEHLDEFGGSFERYVRRKLTITEMSEVLVAGYDCEELRKRLNDAVWYSVRDPDADYYGRRENGRLVVKGPDASVEADFHLIGYYVENCTGAVAACLEFGADPEGVAEGLATFEGVPGRMELLGEFSGRVAYIDAAHNPDGLKASLPPFRELADERGGRLLVSVDNPDTVTERDKFEFGRIVGEYADFVAASGYNETLERLDRSAAEEVVKGAESAGCEGVAVDSVREAAEEVAARSEEGDVLLHVGPGVVNAYDRVKRAFLRGLTSVLGEPSDEA

SEQ ID NO: 1048 - protein, 513 aa, Methanopyrus kandleri
MKHEIVRQALIYACEEMGALLRRSAFSPNIREREDFSCAIYDADGELIAQAEHIPVHLGSMRWAVQAVLDEFGSSEMEPGDAFLLNDPYAGGTHLPDLTVVAPAFHDDELVAFAAVRAHHADVGGKVPGSMPHDAEDVYSEGLRIPPIKVAEDGEPRDDVLRLLEANSRGGEERRYDLTAQIAAAFRGCRQVRRIIDEHGREAWERACEWCKDYAERRMRVAIERIPDGEYSGEDYLEGDGISEDPVRISVTVRVEGDEVTVDFTGTDEQTRGPVNAPLPVTYSAVFFALKAALDPETPVSEGTYRPIEVIAPRGTVVNPEPPAPVCAGNVETSQRIVDAILDALREAIPSLPAHSHGSMNNVAIGGVGFAYYETVGGGAGASPDCDGESAVHVYMTNTANTPVEHVEREYPIRILEHTVRRGSGGEGKYRGGDGIIKRYLALERCRVTVIGDRTMHPPRGVDGGKPGKTSEYEVERSNGKVERLGPKDSTVLEPGDMLIVRTAGGGGYGKGE

SEQ ID NO: 1049 - protein, 95 aa, Methanopyrus kandleri
MEISEFQRLMDELYGEKDRKRGPERTLLWLVEEVGELAEAVRKNDRQAVREELADVVAWTFSLANVLGIDVEEVLKEKYPGRCPKCGEIPCRCNE

SEQ ID NO: 1050 - protein, 370 aa, Methanopyrus kandleri
VKDGVLTAEAGLVGRDLELLSPITIEIEDGRVRRIEEGREPGADDDFDVVLPAPFNAHVHAADWAFRHAGLGMPLEKVVAPPDGLKHRLLEKVGERELEVSIRDFLETSLSFGCPGVADFREGGVEGLKLGLRAAEGFPTYVPMGRPKALDDPERVEEELRVLSELTEFVGIPDVHLPDDVLEAVRDSGLRVYVHANENWRSVRECVREHGATEIERAVDLLEPEGIVHCVVLTDRDRELLEELDPVVILCPRSNDYYRLGNPDPRRLRGLRVLLGTDNGMSVEPDPWAEAYHAWIRTGLSPLGALRALTVEAASVFDLPILEEGRRLSAVGLKGLPLPETVLGSRQRLAAHVLQLIKTSRVHVLLGAES

SEQ ID NO: 1051 - protein, 129 aa, Methanopyrus kandleri
LTRYVVLLDGSEASFEALEHALEEADEVIGVYLIDCRAFKGLNEDMARALEEFMRQEAELIRETVEKRGAEFEIVRGEGPEAVMEYAREVGADAVVVGVGHIPRFEDITFRRGIEGHVRDVPVVLVPSR

SEQ ID NO: 1052 - protein, 549 aa, Methanopyrus kandleri
MCCAPTVPENRTGVRDVSEADAFDMACRELVEKMLSGEIRTKGELQEAKREVCRKYGLSKFPTDADVLERATPEEREKLREIVVKKPVRSISGVAVVAVMTKPYPCPHGRCAYCPGGPEKGVPQSYTGKEPAGRRAKEHEFHPRKQVEARIRQLEISGHPTDKIELIVMGGTFPATPLCYQEWFVRECLNAMTGKDALTIEEAQKYAETSERRPVGITFETRPDYCKEEHVDHMLKLGATRVEVGVQTIYDFILKRVDRGHTVKDTVEATRILKDAGLKVCYHIMPGLPGSNPERDLRMLKRLFKDPRFKPDMLKIYPCMVFEDTPLYDAWKRGEYEPYDEETAVKVIAEAKHRYVPEYCRIMRVQRDIPAHLAAAGIRKTNLRQLVHDYLEEKGWECRCIRCREAGHRMRQGVEVDPGRAELRIIKERTWKGGMDYFLAYEDPEADAILGYLRLRKPTELAHRPEIDPETAIVRELKVVGPTVPIGERDTDAVQHRGLGERLMRKAEELAASELDADKIIVISAIGTREYYRKLGYERVGPYMGKDLT

SEQ ID NO: 1053 - protein, 177 aa, Methanopyrus kandleri
LPKIPVGLGYKLAYKGAKLGLWKWGTTAKTGFFSLILHSLIFGPLGVAIVIATLFHELGHYLACKLLDVPASPPVFLPLGGAFVQHGWTDPDKEVFIAAAGPFGGALAGIPLLVIYPKAAVWNGLIQLFNLLPIPPLDGSKVLRGLWMPSPTAWIGVATAVLAAALSLVGILMGLHA

SEQ ID NO: 1054 - protein, 310 aa, Methanopyrus kandleri
VSPRPYGGRFRSRRSCGSRGGSEAMEVTELEGLTISWDARPLAPDSVYGEDYMRIYRNVAGLLKIVQKAFDEPKGDLAIGFSGGKDSFTCALALEPFLREWDVNPKLVTVDVRVRGVEVWRPYRKELDRMAKALGYEFELVRAEEDVAEPSEELNKPPCKICSAIRRRILAERHDVVVYGHTAEDAIETLLMSVNRRRDAGTFPPADLLEEDDALLLRPLYVVSELRTARVYHEVTSRLGLPKVEPECPYAKRYRNSDSPRRTASELVERLREIARVRDELAVENLARGLARMALADVLCGRGRLEMPSS

SEQ ID NO: 1055 - protein, 352 aa, Methanopyrus kandleri
LALVYHEEYLRHEQHPTHPERRERLSYTVDRFEEEGLFEIEGIDLVEPDPVDREVIELVHDPEHVELIRRMSESGGGMIDLDTAVAPETYDQALLAAGGSVLAVELVVRGEYDTAFAMVRPPGHHAGRAKAAGFCYFNNAAIAAEYAIRELGVDSVAILDWDAHHGDGTQEIFYDRDDVLYVSIHQDGRTLYPGTGFPYEAGEGPGEGYTVNIPVLPRSGDRTYREAFQRIVEPVVREFDPDLILISAGQDCHFTDPITDLAVTAEGYRWMMQRATELAEDLGASGPVAVLEGGYSVEDGLPYTNLGVVCGMAGVPADLREPMDPQEENPRGPEGVRKVAREHSRYWTSVKA

SEQ ID NO: 1056 - protein, 716 aa, Methanopyrus kandleri
LRFRTAIILSFLALTAVMAYGALHLNVEVDQTKYLPDRFESMKWQHVVERELGTSTKTLLIVIEADDVTRKPVLDYMRRIEDRLRSKPYVENVRGAPDVLRESPANFPAAVTMPGLRPLMSEMERSKEMFVSKDHKVAIIRVGLKSDADYRKVVPDVRRSLERDKPKSVKFADVTGSPAINYDFYRGFLKDLVTVTALVSAAVAAVLYVDFRRWWAPVLGLTIILSAVAWVLGIMYWLGFAPFYATVLLTVVLMLGVGIDYVIFTLTRFQEEYDIKGRAKGEAILTAVRRAGRAVLITGLTASAGFAALALSEFRMVSEIGLGIVAGILTAVALTLLVLPSLLQSIPIGRKSSEKKEESWKVLSIPVRHPVPAIVALLAITGLLGYGAAGVKPEVNIEKFLGHNLPSLKARDVLEKHMDVSHHFATIVVEARDVRDPKVVRFMEKLKRDAKRTGVAARVFGAPDVIGMEKTVERLPAPIRSALEPKVEDMEKGVISGDGKVAVIQVQLKPGDPKVQGRKILDMVRHEHPPTGVKVGVTGLPVAFAEMHEQVNEDMRRSTIASAIGVLAIPTIAFRNPIPPVFGLVAIGSGILWAIGLLGGVLRIVPSFLAMQTTICILLGIGMDYCVFLASRYREERKEHGVKEAWTHTMERAGPGVLFSGLTSAIGFLSLLLSHTGIMRNMGLYQGIGVLSTLTLVLVGFPALYVVISRVFSRGR

SEQ ID NO: 1057 - protein, 233 aa, Methanopyrus kandleri
LSLVAARNPPDPRKLGSFKVRRCAACGRLMRIELSECNCVRCNDLRGEPLEEGPYIENSGPYCDRCRGGVEPTSRLPEVAVAVCFLTDRRNHDVLYRAAGALAEVVPRLREERRFVAVGTPVDDLYFNLRCGMEAGIDFGIRAQMSSIFTHMGPEYLVIAHNPVRKLRGRPRERFRYTLESNIEELRRVIVLEDVVRNTDFKSVYRDLGREYPDVFVFASSGEVEKLVDALRK

SEQ ID NO: 1058 - protein, 322 aa, Methanopyrus kandleri
MIPTLTGRTDDPDRLMRGLEELGWTVREKGDRLVAISPGGQQVEANRETGELRITGRGEGTAARTLVKLAVKLGAEVELEGLSSEDRRPLVYGPVPSRRLGTSLGIDLPRGMCTHDCEYCSVGVSRRVSPHERFTVDPVAVREELSETLRRCDPDAVTFAGVGEPTLCANLREIAEEIRPLVEGVGAEVVLLTNSTWVSECADVVDVAVASLDCAREDLYRTINRPHPDMSLEHLVEELSQCDPGDVVVEVLLCRVGKITNADPDHLRELADLLGSIGLERVQLNTVARPPARGRAEPVGRDELLVARRTLESCGLEVSVYR

SEQ ID NO: 1059 - protein, 133 aa, Methanopyrus kandleri
MQMLAERVLKWGPILVPALALIGLPGLRVILRSRVASEGEARAVVRRAGLYLGLASPCAGVAAAYTLSVGSVLLGRPELAAWTGPALILTPPVTLLLSYVPGRSESMAKAMLVSSLTTSVPTTTAVWYALSYL

SEQ ID NO: 1060 - protein, 190 aa, Methanopyrus kandleri
LKIAITGTPGVGKTTVCEALRDLGFDVVHLNKVAREMDAILEEDEQRQAKVVDLHALRRYVEEWEPESDPAFVESHYAHLMPTDLVIVLRLHPSELERRLKEKGYPPEKIAENLEAEFVGVCYGEAVEVRSEGCFIRPPEDVIQVNVTGLSRAEAADRVLEAVNHRRGDDVDWLSDEEAQRTVERYLKYR

SEQ ID NO: 1061 - protein, 314 aa, Methanopyrus kandleri
VRRREVLRPLREDDKYRHPAVLDEGVKIIGDNLADVTAEIGAYAEIGPSVVIRRKAAIYGFCRVFDSDVGERASISPFSIVRADVGNDAFIGDGSMIGAIGEDRAKLGYDCFIGMRCVVYGGVKVGDGAIVGAGSVVEEDVEPYTVVMGRPAEYVGDTVRISANTFVGGEEASAQARMVTRGYDTGWETLGCTESRGVNLTVVTFDREVWERLMGLLGRFRGEVDHGTFRFEGVEFFGIAASSERPPRRVVDKIRELLLERAERLVACILDCPKGYGRDVVVRSGRISDERVTGPLRARGSRYYRRTEEGLHTV

SEQ ID NO: 1062 - protein, 202 aa, Methanopyrus kandleri
LKVAVVAVQGAVEEHESILEAAGERIGEDVEVVWARYPEDLEDVDAVVIPGGESTTIGRLMERHDLVKPLLELAESDTPILGTCAGMVILAREVVPQAHPGTEVEIEQPLLGLMDVRVVRNAFGRQRESFEVDIEIEGLEDRFRAVFIRAPAVDEVLSDDVKVLAEYGDYIVAVEQDHLLATAFHPELTDDPRLHAYFLEKV

SEQ ID NO: 1063 - protein, 313 aa, Methanopyrus kandleri
LACGIAGIVLPEPGPVGAILTEMLDALQHRGPDSAGYGLYRDVDTAVFVLELPAEDGEMELLSEVERALEGRQLKRVERIAEDAGTRVYRLFVEGFSTGRQGQRELAEVVEKIENSDITVLSAGHGFEILKDVGTAAEVSEQYGVEAIEGTHGIGHVRFSTESEVDRYHAHPFQSYMIPNMAVVHNGQITNYYTIRERLEIKGYQFKTNNDSECIVVYVADKLRDGYSLEEAMEEAIRDLDGPFCFIISTPDAIAVARDPLGLRPGVIGFGKDGAVAVASEEVALRRIFGDELEGIEQIEPGEYEVFEVGGRG

SEQ ID NO: 1064 - protein, 230 aa, Methanopyrus kandleri
LKERVIDCRDKEPRDINSALKTYAREYDRIVLENPGAKHYIAAGLTEEVEVIIKGSVGYYVGTMIHGPRILVKGNAGWYPGDNVTKGEIVIEGHAGDGVGQGMYGGTIVVRGDAGSRVGQIMKNGTVIVGGDVEIMTGMYMMGGTIIVLGDAGTYTGESMLRGEIYVLGEVEDLGKNAEAVDPNGEDIERVWELVRAYDFDVTRDDLKALTKIVPRSKRPFYGSEEMEEG

SEQ ID NO: 1065 - protein, 229 aa, Methanopyrus kandleri
VATTVVLCSGGLDSSVIAKWAVEELGGRVICLFVDYGQRNAPFERRAAERIAEAVGAEFETVGTFWLRRLCPDNPMFAGRLPREAGTEDLSANWLPARNWNLLGVAAALCDHLYLEGEDDEFHIVWGINAEEAERFPDNTKEFADAVAEALKRGLPSRPRLHSPLAELYKPGIVRLGSELGAPMELSVSCYNPIWEDDTPVHCGECEACYHRKRAFERAGIEDPTEYLE

SEQ ID NO: 1066 - protein, 113 aa, Methanopyrus kandleri
VGLAGYLPVELCRFVRNPDPNTSGKRAEQLVRRYGPYLGVLTVMVLFGSYITLATMAVAGLGGDRRAHLSALAGSMLLALLGYGATHTTLRALQPWLMGQEWGEELLRRFGIR

SEQ ID NO: 1067 - protein, 481 aa, Methanopyrus kandleri
LKDDKGGRKLFRVRNERHERYLAVAVPLLAAVFLLTTSPVMMNWYDVHYFEEWYRVAMSKGLLHVYPECEKVHYPPMAVVFYITTRDLIHNLGLDSNPWTFQFSLKIFLVAFYLLTCLVIIREFEWPIAQWGVISVPMGMVVWGYQFDTIIAFFLALTAVCVRRGRPIAAGVSLALASSFKYVPGILVIPFTLILKEKYGSRPAKIFFLTSAITVALLWSPFILYDPEAFWKQAFLFHMLRLPQDLTPLNIPLLLTRWHVYPYHFIIGKLSGPLIILGFVTLALWLWKRREILQESIRTSGLKHTIWGSAALFMLWFALTTKVGNPYYIAWIYLWVFPFAVWLLPSWCVGFLNTAPFLLALSRLPAAVCNAPVFVPEDVRWYPALQLLGFSTPLAVEKAHQLYLAAPNFMRLWYYHMHQTELVLVVVYTIVVTKTLLDLLKWIRDPKPADERPHDWAIHPMLLAFTLPAYIFALYIALPIG

SEQ ID NO: 1068 - protein, 317 aa, Methanopyrus kandleri
VSKVAVIGATGRVGSTAAARLALLDCVNEVTLIARPKSVDKLRGLRRDILDSLAAAQKDAEITIGCERDDYVDADVIVMTAGIPRKPGQTRLDLTKDNAAIIKKYLEGVAEENPEAIVLVVTNPVDVLTYVALKVSGLPKNRVIGLGTHLDSMRFKVLIAKHFNVHMSEVHTRIIGEHGDTMVPVISSTSVGGIPVTRMPGWEDFDVEEAVREVKEAGQRIIETWGGSQFGPAQAITNLVRTILQDERRVLTVSAYLDGEIDGIRDVCIGVPARLGREGVLEIVPIELEEDEMRAFRRSVKVVKEATREAMEAISER

SEQ ID NO: 1069 - protein, 312 aa, Methanopyrus kandleri
VRLKRLSTNHLLSIADLDREDVETVLRVAERFKERYLAGERVIPILEGKTLGLIFEKPSTRTRVSFEVAMHQLGGQAFTYTKQELQLGRGEAIKDTAAVLSRYLDGVMIRARRHEDIEEFARYSEVPVINGLSDLEHPCQALTDAFTIREKLGRGPHTVAFVGDGNNVCSSLALVCATLGWDFVHAVPEGYECPDRVWREVERRAEESGSETRVVRDPKEAVREADVVYTDVWVSMGDEAEREERLRVFRPYQVNEELMSHAPEHAIVMHCMPIQRGYELTDDVADSERSVIYDQAENRLHVQKAILALLMG

SEQ ID NO: 1070 - protein, 449 aa, Methanopyrus kandleri
MLKVLLVGSGAREHAIAEALCGAPDEDVELYAFMGNRNPGIIRLAEDYVVGDPTDVEAVARAAADWNVDFAVVGPEDPLAEGVADRLEEEGIPTFGPKRGPARIEWDKGFARELMEKYDIPGRPEFGIFEDPDEACDFIDELGKPVAVKPAGLTGGKGVKVVGDQLKNLDEAKEYVKEIFEEDIGGIPKVIIEEKCVGEEYTIQAYTDGEKVIPTPAVQDHPHAYEGDKGPITGGMGSYSCPDGLLPFITKEDYERSVEILERTVEAIKKETGEPYRGVLYGQFMLTAEGPVVIEFNCRYGDPEAMNILPIAEGDIVTLHASIAEGSMEGEIEFLEKATVCKYVVPEGYPESSEGEGDVIEVDEECIHRYDAVPYYASVNLDEDGKIRMTSSRALAIVGIGDELEQAEEAAESAIRECVSGERIRHRSDIGKHETVEKRVRRMKRIRGE

SEQ ID NO: 1071 - protein, 183 aa, Methanopyrus kandleri
MVMNRERLAEMLLEVGALKFGDFVLSSGKRSDYYVDIKEACTHPKVLDALTDALLEVLPDGDVLAGPELGAVPLVSVLSVKAGLPMAIVRKRKKEYGTGERIVGDVRGRKVVLVDDVATTGGSLLEALEAIEEEGGEVRDAVVVVDRQEGAEEALKERGVRLSSVLTADDLRGLRDAESTARG

SEQ ID NO: 1072 - protein, 173 aa, Methanopyrus kandleri
MVEMGSGAWLELGKGLWFILPAYIANLSACLFGGGRPLDFGKKLSDGRRLLGDGVTIRGFIVGVLAGAVVGLGEGLVVGDPWKAGDGFILGLGAMAGDAVGSFVKRRIGLERGAPAPVLDQLDFFVGAVLLYYLVYGWHPPGWVLVGLAILTLALHWLTNVIGYLLKLKEVPW

SEQ ID NO: 1073 - protein, 499 aa, Methanopyrus kandleri
VSDTLYETESLCPECLRVVPARLVRTAEGSVEIVKKCPEHGEFREVVWSDVEFFERAFEYEFKGPGVENPQTDSENGCPLDCGLCPCHESTTALGIIDVTNRCNMNCPVCFANAEAKGYVYEPSLEQIEEMLDLLRSERPVPAPAVQFAGGEPLVREDIVEIVAAADERGFHVQIATNGVEFARNPELAEDLHAAGLNVVYLQFDGLNPEIYEEIRGSRKVLELKKEAIKVLEREGISTVLVPTLARGVNDDQIRPMLDFAREFEVIRGINVQPISFTGRTPREERERMRITIPDFVKLVEEQTDGRIPAESFYPVPIAAKIARLIGQLHGKRKPEFSAHPICGVATYLLDEGDWYRPITDYVDPDAFIDALEEVAEKAGSLDRKRDRAKAAWIVTKYLRRVFKGLTGKRKLARLVLDVVTKGTYDALADFHWNALLLGCMHFMDPYNFQTDRVRRCVIHYATPDGRIVPFCPYNSIHREEIERKFGVPLEEWKERRNG

SEQ ID NO: 1074 - protein, 250 aa, Methanopyrus kandleri
LPLREAAERVVEAETVVVLTGAGASADSGIPTFRGKDGLWNKYDPRELATPEAFARDPEKVWEWYLWRRRKIAEAEPNPAHTVLARMERDGLLEAVITQNVDGLHQRAGSRRVIELHGNIWRDECVSCEYQRVNDPERGEGLEYDELPPRCPECGDPLRPGVVWFGEPLPSDALVEAENLARSCDVMLVIGTSGEVRPAADLPLVAKSCGATLIEINPSETALSPHMDVIIRERAASAMEALWNEIERLL

SEQ ID NO: 1075 - protein, 235 aa, Methanopyrus kandleri
LSDPLKGIIEEIRADLGYKESEDLWAASFLCELLRDHPRVLRPEDLPVEEEVVVVGAGPSIAELPKIVGELEDSVVYAADGACRALLELGIVPDVVVTDLDGPKEYLLMSSECGSITVVHAHGDNVTELAELVPTLGRILGTCQVEPPCDLLHNFGGFTDGDRAVVMAARLGAERVLTVGMDFGNLTTEYSRPGEGRGVFRADPVKRKKLAWGERVLRLVERELGVEVESLTVRR

SEQ ID NO: 1076 - protein, 343 aa, Methanopyrus kandleri
VVVVGIVGASGYTGGELLRLLARHPEVEEVRYATSRRLEGKPVWKVHPNLRRDYPDLEFSDPDPVEIGEDCDVVFTAVPHTAAMELVPDLLEGGAVVIDLSADFRFDDVDVYEEWYGVEHAAPELNDEAVYGLPELHRDEIRRTDLIANPGCYPTGAILAAAPLVEEGLVDVVIFDSKSGTSGAGAKPSEVTHHPECAEDLTPYNPTDHRHLPEIRQELGKLGDVEVHFTPHLAPLVRGIETTAHGLGDVEIEPKELRELYVEYYDGEPFIRVCEVGEAPRLWAVRGTNYCDVGVFAVGDGRVVVASAIDNLTKGASGQAIQNMNVRFGFEETAGLEEPGYHP

SEQ ID NO: 1077 - protein, 143 aa, Methanopyrus kandleri
VRLEDILQMVETCNRKIDRTAFLIARSVIWDLEANGEVRKRAEQLGHEIVKRMEFSDVEDACEYLQEIRCGEVQVGVQEDEADELVADMGYDNVVVYDCISCCGAPEMGETLCAPGERPDPGDDRRHRRPGVLRDRVRMLGAR

SEQ ID NO: 1078 - protein, 244 aa, Methanopyrus kandleri
MYFSKERKSQFRSGVTASTGDSGSRGDVALKVTVVVSDEPPLDPELRSGPGFAALVEDGRHRVLFDTGPDPDLLLHNLKGLGYEPEDLTAVVISHNHWDHTGGLQAAESEVARIVTPERIGVKNELVREEWLGIGDMVLTDVLEGPPPERALYANGLLITGCAHPGIHEFVEWCVRRGLEVHTVLGGFHLMGATEIEVEKVADRLEELGVKIAGPCHCSGEVAKRMFRRRFEFLNVGPGLEVRV

SEQ ID NO: 1079 - protein, 194 aa, Methanopyrus kandleri
LRVLQVVGPKDSGKTSFCEEAVKELRGRGYRVGYVKSVGGHGLDLQDRDTGRVPADVRVGVARKETVLFLDLDIDAVLGLLALLGLDYVLVEGFKSRELGVRVGFGGYTEGPTVPAEEIDTSPADAVERYAVKYTADIDCGRCGPGSCRDFRRAVARGEENPDGCAAPEDVTVLVDGKPLGLNPFVGDLVKSVV

SEQ ID NO: 1080 - protein, 423 aa, Methanopyrus kandleri
VTKVAVEVYGCAANHDDGRLVRELLRREGFEVVEDAENADVAVLLTCIVRDSVDARMVNRMRELERVPTVVAGCFPEAYPERARKLRPDAALVGPRHLDRIPEAVRAVLRGDRVEFLGEREDIDWKADAPRELPNLAAIVPIAEGCPNRCAYCAVKLARGNLRSFPPERILRRVKRELERGAVEIHLTAQDTATYGLDRGTNVVELLEDVVDLCSRYGARVRLGMFNPGHAYPISDDLADLFASRDDVLYRSIHMPVQSGDDEVLRRMNRNYTVEEALEVYRAFERRLGYFSFITDVIVGFPGETEEAFRNTLRFLERTRPHILHASRFCRRPGTPAARMEDQVPEDVKLRRSRILHRKRLEWAEEANRELIGETVEVTMVMEKWGRDEHAKKTVFRGEVPEPGERLECRIVDASHARLVAEV

SEQ ID NO: 1081 - protein, 489 aa, Methanopyrus kandleri
VAIIRSVGRAASNPVVLIKIVLGASPVLGVIFVLSTLIVLGSTKLAPVSLSLIAAVLTSAPFQVLVSRVILDTLFLETFIPIPGIIILSTIFCTVCSIILYNELTQLFNIKISLATTIATPMATLAYMFTAAHSAVSWARPGLIARRVTMPWALFVISFIVSLMIIEADQAYLVASTILVAMMLLSFIDVIQGVNRISKISIFTRGNLLIKSLKVAIAAFADYSVMMMSAIAYYLVMFFDKFLVWSKYGFPYFPLDSPSFVGMMPLFAGTLAAIKFWDSVEEKLDLLYRVDWDGMYALREFVMKAYWRSLAWTLVLAGLITALIMLAIGISVHRTLGYISLAVLGALSFFAGLGAVKLPRKYAIPLLLTATGALFLKVHVSNISVLMMYLIGSLPGAILVYIYPQLLTFRRDLEALLVTSAVPATELLVWKYFGESFLPMGYLTGAILAAGLSLIFSIRMYWRISREAYRVVAYNAFVSYVTEIPRRWG

SEQ ID NO: 1082 - protein, 491 aa, Methanopyrus kandleri
MVEFRGSGMYKRPTVTVVTEATYPVALGGVTTWVQRLIKYSPDVVFNVLCMTGPERTEPVVEIPANVRDVVIQEIVPKGNKLRRWLDRITPTHRLRWSTAAKTLRATFERMVEGEPLSEPMLKELWKVSKSPTSVLASSTMYELARYVHYLASQYEDKCENNPFSDVFWVAVNIASFVLGAAAGARRLPNCDVAHAQNSGVCGFLCSVAKAVRNVPFIITEHGILLRELDTRLEGYGRTTRELFKECFRSMMLTSYEQCEEIIEISDYHAELALEQGAPEDKIKVVYSGIETWKYSPGDLERKYNEPEVLEVGTITRIERVKGIDVLIEIAARTVEHIGNVVFHVVGPVEDEAYYEECRKLVKEYGLEDIVRFHGPCTPDEVVKWLRRFHIFLLPSRSEGLPMALLEAMSCGCPVVASEVGAVPYIVDRNFGRTFRSEDADEAARHLVRLLYDPELMFEMAHHATKRAKQYDVMRMCHDYFREYCKYARGD

SEQ ID NO: 1083 - protein, 517 aa, Methanopyrus kandleri
VSVRDKVRVLRCDCARVLEVEGVETPAPFLIPERLSVAVENVPEVRELVKELEELARPYSVRLTPDDLPSPWTDPAEALSDGSITVYRLESIPDAREFAEVVSKIRRSGSVRAVTVRDPEWIPLLFYLGFDLFDAALCLRLTLEDQLLLDDFSTETVETEDREELLRENWTQLQFCLLRLREAIREGTLRELVESVAARHPRIAEVLRVCDRERAVARYVNLNRNTQIACATDLSFDRPEVTEWLRRVRRYEPPDWVEAVVLLPCSARKPYSRSPTHRRIMRITWNFPVDEIMITSPLGAVPRALERTFPAAHYDVRVTGEWSREEIERSAALIEKIVGDLPIVCHAADGYRKVGKELEERGYDVVYTCRPDGNPASRGALEELRRTLEDLTKGEPGDLREHVPRAVSRFQFGVDVLENVDYRFDGQRVLIDGERAFSVPPTSGLLTLSQLGAELCVSSRVPPIHAEEGTKAEMVDVPEDVLPGFHWPVDLGDEIRPCRVIARPEDVPPDTTVIETR

SEQ ID NO: 1084 - protein, 472 aa, Methanopyrus kandleri
LPVHPIESRYGSDELRRVFSEENKVAKMLEVEAALVRALSEVFDFVPEEAADEVERVVEEITGDEEELRRFVERVKEIEAEIKHDVMALVKALSERCEVGGDYVHLGATSNDVIDTAHALVLREALSIIYRRLHRLAEVLAEKAEEYADLPMVGRTHGQHAVPTTLGMKFAIWAREVVRHLKRLRECANRVLVGQLSGAVGTMAALGEKGPEVQRRVMELLNLRPVTVSNQVIQRDRYAELIALLALIGSTLDKIGREIRNLQRTEIREVEEPFDPEKQVGSSTMPHKRNPIRSERVCSLARVLRSNVQIALENVPLEHERDLTNSASERVILPEQFLLLDEMLRLTIHNLEGLRVYEENIRENLRLTKGLNMAEALMVELVKRGIGRQEAHELVRRLAMRAWEEGRDFAEVVKEEERVRELFGEEELDEVLDPEKYLGVAPDLAREAAEKTRRDLEEIDREMKEVLGVGAG

SEQ ID NO: 1085 - protein, 390 aa, Methanopyrus kandleri
LVRKVRLVGCRHCGYCSQVVDCPVGDPLWNREDCVGCGACVPACPYGARRLVEVEEGPITVRVDGEEVEVESRWVEGALREIGHDVDAPCGVGGCYACAVRLNGEVVPACNSKLTEGDEVETEDVDGKIRVVSGFQPHPVGGVGTPVELKDKPGYVEAACFAHGCNLRCPQCQNHSIAFGAAMGARMRPEEAARLLVGTAREYGVNRVAISGGEPTLNREFLVEFVRKCREYGGPDLRVHVDTNGTVLSPDYVDELVEAGMTDIGIDVKGFRPETFAEVAGIDVKGAAEYVDGVLRILEYLADEYLEEVFVGVGIPYNPELVDKEEVFALTDWLYEHLGEDVQVCYLDYRPEFRRRDLPLPKYEDMVELEEYARSLGFRRVHAQKVSVRR

SEQ ID NO: 1086 - protein, 59 aa, Methanopyrus kandleri
LLDNVLIEIVVDDEDVEEVIDIICEHAKTGRPGDGMIFVIPLEDAVRARTGDRGKDALS

SEQ ID NO: 1087 - protein, 306 aa, Methanopyrus kandleri
MDVTKLVIHYLLVIAKVAPLVFLGFFLASVMIILRVHERLGKLTGRRLARLGLTPEAASAMAASLVSPSAGYPILAEFRREGRLDDRDVVLLVVATTFPTTVGEMFLKGPFFAALAILGPKLGTEYMGALFVTALLQTLPALALYGARSGNGSDIHLPSTSHDDVPPLREAVIEGLRRAARRMKYVLPRMVGIGLPMVILAEVLRSWVHGGLGPVVAITLANVSHYTVGYATAAELVHRGVLSESEAVAALLIAGCANVLMIFLKASLATYVSIFGSRLGLRAWAANLGSSVGARLLMAYAILRWS

SEQ ID NO: 1088 - protein, 93 aa, Methanopyrus kandleri
VAEENVIYVGNKPVTNYVLAVMTQFSEGADEVKLVARGRAISRAVDVAEFIRNNVMPEVEVKDIEIGTEEIETEEGDTISVSTIAITLAKPSE

SEQ ID NO: 1089 - protein, 274 aa, Methanopyrus kandleri
LPELPSVEDLMSRNPVTVDADQSLKFALKTMRKRKVNRLPVTERVSEDRKELVGILTVLDAALAVADAMFGDRSPSRIKVSEVMSSPVITISPGATVLDAAQTMLVHGVSGLPVLDGDRLVGMITKTDLLELVRSEDYVALHMVKDPITVSAGTSLLHARRLMFEENAKVLPVVERERLVGLLTDRTLALELARLREKSPKGKFRSALKRARVDDVMRTPISVRTDYGLVDAAELIVRKRVPGVPVVNYQDEVVGVITKTDLLHLLVEELEAAG

SEQ ID NO: 1090 - protein, 680 aa, Methanopyrus kandleri
MAELAVGIDVGGTFTDLVEYDGRELRVRKVPSSPRRPERGFAEALKIVETDPDVVLHATTIGTNAFLGQKGLELPEVALVTTLGFRDAIEIGRQVRPQTYSLSPRKPEPLVPRRLRFEVKERTSPDGEIIVPVDEDKLRRIARRIAVEDVDVVVVAFLHAYANPANECKAKEVLEEELGDVEVVCSHEVCNEYREYERTSTALVNAVLRQIVTEYVERTWDAVRDAGASEYYLMQSDGYAVPAELTLHTPAKLIESGPAAGVVAARYLGETLGRDRLVSFDMGGTTAKAGTVVEGRYEVTKEYEVGGEVHRGRRVRGSGYPVLHRFIDLTECSAGGGTILWTDEAGALRVGPLSAGADPGPVCYGKGGTDPTITDANVVLGRLNRRALLGGEMPIDAEAADRALSELADELGLEPEEAAYQALRLAVEEMARIVRIVTVERGHDPREFSLVAFGGAGPLHAAELAEILEVEEVIVPLHPGVFSAYGLLAAEVAWEHVTPVMRTLEELDDEELRAVVRGTAEKAAERLPREPDDVRIVVEARYRGQAHELEVQTGPDVTADELEEAFHERHRAVHGFQLNAPVEIVNVRALAVIERKPPEPSPLKEGGEGNPKRALVETREVYFREEGYLETPVFDRDALRADDIVEGPAVIEQYDSTTLVPPGWRARVHRSGAILLHRIE

SEQ ID NO: 1091 - protein, 84 aa, Methanopyrus kandleri
LAGKAEILGEVVLCVIYGYRVAGAVSEISGSLSSRWYGHARSTEDLAVRTVEELGRSLGWDPEEVRRWQAIVRTIGDLARRGLL

SEQ ID NO: 1092 - protein, 482 aa, Methanopyrus kandleri
MRVLGLDTGSTHVDAVVLEDGEVEDRVKVPRDGKLLEPTRRALRALDADERRVSTTLPINALTRGRTDPVHLVLIPGPGLDPEPLLDLADRADVLPGYVDHRGDIVEEPDPDAVEPSGEDHALAVVAKHSHRNADPERKIIEAHRETYVEAVPGYHLPYGNFPRRVATAVLGARVKRVTRRFLEALGRVDGVLRGDGGLQTPEEALRVPVNVLHSGPAAGVLGAAYLTGRDDFLLADVGGATIDLTEARGGRPVTEEGAELFGYPTAVRAAIVRSLPYGGNAVLTGEGITNDTATPACYGGSEPTLTDALVVAGYHDPEPDGDPSKSRRVLRELGDPHEVAEETLETIRRELLRRFETHDSVLWAGALAPALRELTGVGEVVPHHDVCNAVGCAVARHAREAVVYVHTERGYGHVAPAGERFEVDRGRVYSREELVELAIEAAGFEPDEVRVRAFEIVRGGVRVGQWAEVYLYRTPGVEPPS

SEQ ID NO: 1093 - protein, 142 aa, Methanopyrus kandleri
LTPIDPEEDARLEWERSMARLGLKYVPTVVISRVRGVALTLEIFAPVSAPAGSSAIVFVRPYLLTLRGGGPLWEGTLEFRLNGAGNSELGRIDLSEPEVWVGDWVEFEFYTPEESGKYRLVVRYEGPYGTVREEFQLRIVDD

SEQ ID NO: 1094 - protein, 306 aa, Methanopyrus kandleri
MEFSYAAMVAVLAAARGFAPVFVEHLPCESCRGKNCEIIRSSRCLMVATTELLCDVNVGAHVFFSDDLLVYRGVGDPESGISIHDVHDAGPDAARRILDRAGDALNRGLMFIATWDARHGPPEEFERHAPEALNLDVTGLTLPIPRIDTGLHPTDFRVVSAAEVRPEDVADFSDLDLIVDGRRYVVDPVLTAVAEVLGERAVEGLGAIRLEAPQGETLEWWMDSVKRYWKQLRVRSALRNGPSELAAAFWISILEVGTRLASDGWSVDRDTVEDAMRKSARMTEALVPKAIRSLLLGQLAVLVEGL

SEQ ID NO: 1095 - protein, 373 aa, Methanopyrus kandleri
LKWWEVPVRPKPSVLEKLHAAVSEPCEVLENFELFRRAMISTLDPDKPLVRALRGEEIHHVHPVRFLLEEVLDDPATLVDAVERITRWSLSGVFELRVALEEVTETPDVALGYLLEIRRAFLSAVPKYLEEPCLETVAGPLLVEVALMACTEGFLEDEDLGKAAELVAKAVDTDQCIVEALPSLEIQYGDIVPKFASPARVWTIFTLLCHTCANRLPPLEELAEPLENVELGPVEELELLNGYLEEAIAALEIEDERVERWISDILVDTVERAAELIQLLSQPTELAENILNSGATVRVGWIEIEPKEYDPLWEEKGAQESLYSRIKRIQNLIGVEHADEVIERASALGGVELPVGGGVEVESSVETLRRMIG

SEQ ID NO: 1096 - protein, 100 aa, Methanopyrus kandleri
LAGRPSIRYRYGIAEIPGDPKLAYETMWAALQGEARRIFDGLSRRLRRDPSSFHRSVERLWGEVRRRAQVSPALWELARELGLPEGTNLLNLLGRLLGLR

SEQ ID NO: 1097 - protein, 116 aa, Methanopyrus kandleri
LAVFALWSLLRLLWGPRAGPGTVVAVVNLTAVGAATWALFSGHWERLSEALQARSTACLVFFAVTIPLTVYGAWRIIHDFRRRLCGRPDPRDVAAARVLLQGARKLWKSSEERGFG

SEQ ID NO: 1098 - protein, 377 aa, Methanopyrus kandleri
LDWNDPLQPEESALEKLHVAMPKPCETLGDFEIFRRVVLSTLESCEGLAGLLKGEGIEETHPIRFLLEVLDTPSTLAEAAERLIHWTISGVSGLWEGLRGTVDPAEIVLLHFLQLRRFFVRRTPEYLEDPGLESVLEPLSVEVALMACAGGLLEREDLKEAAEYVADGVGVDERVLELLPELGVRYGSLVPRFASPTRVWVIFALLCHTCANRTVPPEELVKPLKELRPGPIDEIEYSVREALHEAVGGLGIDDEEVLRWVGSILVDSVEHALELADTLSRWEELAVKIPGAGAVIRLGEVEIQPGEYDPIWEPGPQEEVHESVVERVRELVEEEANGAVERLYELDMEEAGELVGDDALDDLLDDSIEELRKRRMR

SEQ ID NO: 1099 - protein, 348 aa, Methanopyrus kandleri
VLETILLATVAWTVQDHDQPFATYWQDVKFWEILERHPRTLVVDPYCGPDDRPWTKDEIRTLREHGVKPVAYLSLATVGKHQTDLYSLAEEKGLLGPRDPYWEGDRAVRFWERTWLDALRTKFEELRDLGYEGVFIDVVDPWTLDWYVKWFRRETGENLEKLRELTYDALEELIQAALHLGLEVYVNVGGAIFDPKLAELKERYGFKVVVEDVITDDEGNLVPDDVFRDYLRALAHLGSGVYVIEYDLTMTPEVNERLEELFAETKVEAVYVTSLDHDRLGIDIVPIKAPVNPSDTSGSSGEEKASYTRENEEDLERIPVEELVEEGPKKLPVIPIVPPVRRRCLSHG

SEQ ID NO: 1100 - protein, 415 aa, Methanopyrus kandleri
LCLVLVEEATTVPTFPGALYVLDPPGEPGRLREGPELTDEEGRSVVPFVALVEPPLREVIRVEGTTLHVHPDAVVHVDPDQPVVLTGYACDDRHTVTAVLPFRSFLVALDHARHGPPDPYELFEVFAILYDPIQAAAFTLNARGHALLIDEHGVNEHAMLYTTPPGHPGPDHISSRHVRPSDLQGAPKHVTGDGPPILPRDRYLDLLARTQLITGVPEPGRADFRLLENVHEYVRPLLTTIHLAHHWETRQVHEETGRLVAEILRGDLHREVADAHKRAVRALGSRYPTPAYAPDARVRWARQLAGPVSDRVLTKVQDFARLVACHRLVNRLWTFVDTVTLLGYEECVDLVEMAYSYTEHDLPGHEIERLLRPWIDALRDPHYRRLERGTAPPPKLRLVEPEEPEDLLVCYDRLL

SEQ ID NO: 1101 - protein, 131 aa, Methanopyrus kandleri
MVPRQHMGLWGLPHLSEDERLRKVKEALKSGRLSLTDAVLATICVAYREFNMGITCDEIVKVLRKLGYNNVNKRKIYSLASRLKKEGLIESNRVSGRAIYAIKDEDKAIERVLGKTRSVKAEDLLKALEEV

SEQ ID NO: 1102 - protein, 303 aa, Methanopyrus kandleri
LRCTRCGERNAEYERPYAGDAVCGRCLVELVRDRVFREIRRWRWFRPGQRIVVALSGGKDSSLALRLVTEYVEPLPEVEVIALTVDEGISGFRDACLRAAERVADELDVEHEVVSFEEEYGFALEEVVEDVDVSACTLCGVLRRRLLNRRARELGADVVVTGHNLDDEAQAALMNFVKADLAQLARLHPEVRPEDDLIVPRVKPLRGVPEREVRWVAEELGLPFHADPCPYARFSVRSFFREILDEMEERLPDVKFGLVRALDRAGPVLAEAFLEEGLGRCERCGEPAAGKLCKACELLERLG

SEQ ID NO: 1103 - protein, 244 aa, Methanopyrus kandleri
VDPEIALQGLREHSTVYGEEDRIVPVWFAFFPQVLTFLGWLTIVMAKTFPGHATFLVLLGLLEALIGYPLAVYLMYLMIKRRNEHVTRSLGFLRYLVELLAGVGYDVDILRSELEEMRLHTERRNPVIYALLTLVPPIGWLVALYIYHFLNRDLHEHSVRERDFLESVARLLDMNPHEPPFELETFYVVPRRSTFLYFVLTLLTAGIFALYWWYTVVQDPNRHFRAHRRLERDLIESIEQAFSD

SEQ ID NO: 1104 - protein, 395 aa, Methanopyrus kandleri
VILTLDPQVAGASGDMVLGALIAVGADPNRLEEVVHEVSSLGHEVDVHVHEIQKRGIRAVRVEVDAEGDLRDPDELREAVKTVAENVLEDRWRELPELALKYLLRAEERVHGDLCHLHELGSSDTVVDLVGTAALLEDLNPKASEVLPPNVGSGTVETEHGRLPVPAPAVVEVLSEWDVGIVREGEGELLTPTGAALLRTIDELLPDPPPPYRVKRQGFGAGTKDLPDRPNVLRALICEPGGSGEHVRIVETSVDDVDGEAVGELIEAVLQLEGVHDVEVLHGFGKKGRPRFVIRVVTEDRPGIEREVFRELFRWTGTLGARVYRCTRVTADRRIVDVDGIRVKVSRFEDVHHAKPEWEDVRRKVDRESAPLTRARLVGDLRKRYEGDGEDGAGD

SEQ ID NO: 1105 - protein, 108 aa, Methanopyrus kandleri
VKEVRLFVDPENVGRVMNAMADVGVTGFYAIEYRGVAPDRWAGFEIREDPESAIKALNDLSERAVMIVTVVPEECVEKLKDAAAERLAGERYTIIVTDVEEIHVDYGR

SEQ ID NO: 1106 - protein, 323 aa, Methanopyrus kandleri
MIDDGFSPESLRERAEEAGSVFTAEELLATNKMVMMALYSLGGERSCASVFRAGRMLAGFFGVETLEDALHTFCELTGADYDLDRNYVAIESCPECLGYVNAEGAVCNFLRGFISRAAEHELGEVVSVAQVACEATGDRRCEFILGERGEVGGFDTEVDEMTAEDIEIVMSADGRDAVEVAAFKIASEGLLRCALSDVARPMFFRAGRLYARAFINAFDPEDPDELIGHVEEISGSSYSLEGDRFIVEKCLECAGMPFKEPICHAVRGALAETLEHWNVPFKDLVEVRCAAEEDEVVGTCVVKARGVIWKAKRVVDAVKRAFH

SEQ ID NO: 1107 - protein, 471 aa, Methanopyrus kandleri
LEYGCLIGGEWLEGDREIVVENPYDGSEVGRVLAPEVDVEALLKDAREGQRRWRERPTYEVREALAEAAHLLKKHEDELAELIALEGGKPIRDARYEVYRTREVLRLSAAEAERLYGETLPGDAQRGRTAELILTVREPVGVVLSITPYNFPLLLPTHKLGPALAARCSVVHKPATVTPLSSLRLAEILLDAGVEPLALQVVVGPGAELGEELARADFDALSFTGSRSVGEHLREISPIPRITLELGGNDPVIVDETADVEAAAEAAVRGACYHAGQVCIAVERAIVVEDVYEEFLEAAVEVAESLKVGDPLDEDTDVGPLIDDGAVEKVRRHVEDAVERGAEILTGGEPEGRLFPPTVLADVPEDALVAREETFGPVLPVIRAKDFEEAIRIANSTDYGLHAAVFTERLDRAVKATRKLEAGGVIVNESTIYRADYMPFGGVKASGVGREGVPQAVREFTEEKTVVIGRR

SEQ ID NO: 1108 - protein, 282 aa, Methanopyrus kandleri
LSGTETVRLRAVSPVTSRTGESVVVDLREDLRRHLRALLGRCLERGEVRRIETALFGGTVNGETIFPAVEFRLVGDELPRYPAGSVFELEVRVESRELPWSILSRYSDDPVEFASECLGWALELLSLLGGVGAQSDLCAGSLLWEGREPRRPVDVLSRTDAALRWVEAKFGDVPDRSPRFAAFRDGYFLVAVGPTGDLYEVLGRVESVYNRLARARFRLVLQVKRTRDGLHFPVAVAFARHARERVELQRAAATFLDLGWETLPKLLDLAAESGRRSRPIRF

SEQ ID NO: 1109 - protein, 239 aa, Methanopyrus kandleri
MELAELAEKVAGERPELAGWAFRILVEARDRRQWGIAEVAFRNALGEVVRLRDLKNKPPTTWAKKWCKHGVFRGMEPVIARGEFREFVEQLPDDWLTTPGERARRQLLQGHFRKSAGRARYAIRIGGIMYVPTLVGPIATYGLAYYLVRSVPDHLLAGARTPMKLVEVAEENELAITSKDIERAGLKPEARTFRNLRYVTCKVRIFFPTEECKLAGRFDVGLLELVTRYRKGIMETFTG

SEQ ID NO: 1110 - protein, 438 aa, Methanopyrus kandleri
MLLFSTAIPAEVKRGLGEAGLRFGTVFEVVGGLVLPYIAEFSEEYHVVEGLARIDKEKVRSQGAVTPALGIPRKKVRNYPLELAQVTLKVRDVLTYKAAAAYFAWIAREFDVSVASAVRAILEDSEFLEALVEILCPVNPKAAEVLAGFRGRMWRDEARWLKFEEMARKALELAEELGDNRLRTAAELILRGKSSGPTVPGARGDHDGVYVYDIGKVRNFLVERMLKYGESSRKQPDEEIIEALVTEYGVDFEDVHYAIAVLSEGRIPAGPLRTDARVLLDNVAGFPGKVERDVPAPWMRKSYGAWFSDLRRLVPVTEENFNDVMRAKGYGISLEDVEEDSEWYLGKTVGKVLLGEDAKVPPEAREITQTENVKFVNAALRPRHALSREEVEEIREVLGSVETDVPVPIEGIVVEKALTEFGKLPMPEDISAAISRGD

SEQ ID NO: 1111 - protein, 509 aa, Methanopyrus kandleri
VLLSLVLIGILPLPPSASAATVYVHVVPYLDSDAWSQDHVAALKEFLSWCEERGIKVAVFHYNVCEETAPGITDLIREYAERGTISLVGLHSTSHALGGLPLSLQYWELEFNLQFLRDRVGSNVAQVLSVPSWVFDANTLYACDKLGVRVIVCGTDITAINPDYDPTWDRLDPIARHMLVGYFNVRGDRLYYIPALSYVSDLVQAAEDRGTTVRELLQNAVRNLIDSGVINVTGDVHLAPWVLIHPWELADADVRQEFENFLSEVGNGSFDFEYQGVTVTFELSDPREVVNMISSGGTNLGLVALPEPDYSSILHAADYHHWWELIDLYPDKSKIVREWLDTMSRWRALDSALWDLTVNGVIDDSIRKDLYRAVERVWNEALLENVLEYWDPSSARWSLLEERKALSTVYREILTLHAELVGSMVQQSRVESLEREINRLEQGLEDLSRRQQDLERRLESLEREFQGLKKQKSKRGLPVLPAPLWWKRRNPFGRRHRCSREGPSHPFCR

SEQ ID NO: 1112 - protein, 203 aa, Methanopyrus kandleri
LHELLTFLLTVLSPVAGLVDGGSMYLTPDVHTVVGTQWDVTRVVLTTPELDEGAVFVREGDRWRETMEETSTRFGSLRRLDDVRVRWSGGLLHVQCPKSAEVLLLVPDPEGIPVTEGSTFLEGGPLPEGAHVLLGGCVRIRRYRGPVVLEIPFETARESIVSVRWIEGTTYYEYTDWAAHDWDRRFRPAFLLPALVSCVRRCG

SEQ ID NO: 1113 - protein, 374 aa, Methanopyrus kandleri
MRVLVMAIVAVAMVANSASAITGKATTNGATPEEMLENLRVHVVAEEGATLDLKEHPVVVGEHAVYVVMITEGDAKSSGETYEEQPLLVPLPKDGVRVEGDTLTVTRPVDTIGYCLSPGSAVPGWNGPESLVVPTWEGLSSKLAIAVKPDKIEQVLATGVCEPEWVKYVRITPTTVRRAVRILDSNVEWTRYFSWDAQLKIWDALWPTESGSSLTELLPKLLPTAVLALPLIAYLTTQYLTSHAEGTFSPGPTGSTVQSVNPGSPQETSEAQRETQQEVIESPSGGEETPTITTITESTPSETIEAHFAAVKGGPTTRVSAGSSVGGATGRPVRTGTSGVCVGEHSTGTPPLLPILAVLAATTGLLLCRKGLSP

SEQ ID NO: 1114 - protein, 594 aa, Methanopyrus kandleri
VITLYDQSGEIVSQETIEDPPETGSVRFKVTGSGSYRAVLVLQCSSGLTTESVASELSTDVMEIVLPSVRIRASTDVQPGPEGATLRVDYDVDASHAEVDGVEVVLYDEDGYVVGKKEVSDLSGSVTFDVDKDGTYKVLITARCRDADTGTQFSTTTETGVTVQIPRASVNGALSLVKKTPKNAVLSAYYEINTTACTPELLEIALYDENGNLMDRKVVNNPPKTGSVTFTVTRSGSYYAVMTLQCSIDSVTESVVSKLTTDAVAVVLPSVRVDVDARPTPESATLSVEYRVNVDRAEVDSVEIFLCDESGNVVGRKTLADPSGSVTFEVGREGTYRVLVTVHCRDADTGTSFSATAGTDVTVKLPRYQPHSPQSSAEGRTEGEFHTQSGARSATEEQRGQTIRSANRLQEQREGRPTTQPTTESSSSDRVFPPEKLQGRAEENVVEEKGSGGRTGGRSEERERLEETQSALQRGRPTSAEMEARIATVELTTAGRSFLIDVFEDGTLRVTTEDGTVRTVKLPLNVKSVNRVTPTTLEVTLQNGRKVYLTVDERGRLFPKKFVILGGAEKPHLREGTGHAPILPVIPIVRRRRR

SEQ ID NO: 1115 - protein, 547 aa, Methanopyrus kandleri
VYNDSDAYSEDQVKAYEDFLTWCEENGVKVAVFHYPECEFEAPGITAVIREHLGKSVEFVGSHGTAHSIAGLPPEIERLQIEYSWEFFKEQNLEPGLRKDVVSPSIEWVIDENFVHVCRELGIKWIVSGYRTWEFNPEKVVSWQGEDMDYLADVLIVKKLDIDGDVVYVCPVIDFGELVDDVEQDIGPYGLESLKGAFRRAVETLLNVGAIKGNNDGKADLVLWVLIHPWQLVEEMGSTGRTGLDLIEEFIRWVKSGSLDFTLYGVIPVHFELERPSECLELVREIAENPDAYGHPDVTISDLDWTSMVHASDLRTVEELEKKYPEIVKLWREGMDVLKSIAPRLQRLKRTELDPLVRDVVLRTVNEAQLSCMCESEGIIQYLEVWKAELELLRDYLDGSASLLTTSADDNHRVLVFQYSDGGIAAVFLDRNWWCPSPGVVRGKVTLDRADPTDLVVRGEFTSVGLSDITGGRIVVEDENGDVIAEVPFTLDELASGVTISLPKDRRADTVYVVLSGNVQGRLWDQFQIDLSLPIRYRERVSAARYP

SEQ ID NO: 1116 - protein, 87 aa, Methanopyrus kandleri
MAGLPPWMAGALYGLIEAIGWDELRPEALHDLMWRLTFHTVTASAPTIPAVLYHALVNGSPYKWTTTAGLLVDLLTYSLSAFFGLRS

SEQ ID NO: 1117 - protein, 347 aa, Methanopyrus kandleri
VCSCTHRAVLIEYREHVVVSVTGGRIAVSLPDGSTVEVPADSCLLELGSPDMAAYRVGNRHYVGFPIAVTYRGRIYLLGSFRLTMGDAPIVERYAMRVLRNGVEFDVGYSEITVYEPRTLPVDRVLAPFIRAAYSVRCTSAELRDGVLGLTLEVTEARTVEVSQGKSRAPVERYLLLCDLRAGTCRLAGPVGGSPTDDDHGIVCAYDLNSGELTFTIVGDSLPRLPPLLEELGADPAVITSLKLVGKVLSGDYWATSWDYWNLVKRASDPAVRHILERSGIVAAVPMRVVLHPELLLGGYLLAAGTIAGTSLGLVWLVGPDICRDAGPPRHFPGACFESSTGCSCTG

SEQ ID NO: 1118 - protein, 78 aa, Methanopyrus kandleri
VPPIPIVLALLIMIGPASGAIVEFSEEPELVGKLISRVHDLRATEGAVRELNAAFAPGEVASVSGVFVYPPGSPDRVP

SEQ ID NO: 1119 - protein, 506 aa, Methanopyrus kandleri
VFRLGTTPRATTYDPDARIGEVASRFGLPTRVLIEIVRTESFQRSLRRVTSGKPVVLDLRELDSDLASWIATHARLVEPALRELVRTVAPDVEPRVRFRGLPHRFRRVERIRPMDGALISIEGVVREVRGAERLEHAIVDTGSELVAVRLHGHRLGPGLRVEILGIVRSATLDALEVHKKDPIPEVHPDPAELEEFRELADKDPLTTFARAIAPLPGAEEVGKMLALQLFSCVGKNSERLHVLLAGYPVVCSEILHHVLDHLAPRGVYVDLRRTELTDLTAVLKEDRGWALRAGAAVLADGGILAVDHLEGAPEPHRWALMEAMDKGTVTVDGIALNARCAVLAAINPGEQWPSDPPIARIDLDQDFLSHFDLIAFLGVDPRPGEPEEQDTEVPSYTLLRRYLLYAIREHPKPELTEEARKRLEHWYETRREEVEERLGMGLPTLPVTRRQLESVERLAKAHARMRLSDDVEPEDVDIAAELVDWYLETAMQIPGGDEIRISSLKP

SEQ ID NO: 1120 - protein, 324 aa, Methanopyrus kandleri
LRLNAFVVYARPKGPSLTVDSGVLERLGAGCREVEVGSRLDLPLKLVEDGLVEPGRVTIYVPTTWGSRAPARALSVVKRMETVGYEVHVLVGTEGGSGRLPEGFPGEVRVENVKRDLSGILKLSDDIFGLFWSEGSLLLDLGWARDPGPRSDLAILTVSTLVALKVVENTSGERPLERTVMMMEVDRRLVDASELLHALMVALDLAYFPIAPDLGRTVREGIEELLEGLEGSEREELRKAADAFERLSGSVLDAFELGRVEIPDRPGILRELLEYRLRGLSPAMIDGEFPRRAKRMLKKVRRRLKRGDGRPDDTSSERPKRPKI

SEQ ID NO: 1121 - protein, 318 aa, Methanopyrus kandleri
LEVHYELPLGGAHLAYRAAEAGHDVVLCDPSFDISEESMERLESAGVELVTDDTAGVEHGEIQILFTPFGHTVKIARELLDDVREGAVLCTTCTCPPIALYHGLEGELRTKREDVGVSSFHPAGIPGAETQDLILVADARSEESGIELASEEQVERCVNLAEDMGYDVYVLDPELISSIGDMSVVLTVRIVQAICNYFSVARICGAPIEMIEEQVEEVLSTMAYLVGRYGLDAFDRMDGKLLLRSLRNMALTEDVERVVDFFERCYVDLLSGDRESMRELSSMMVPPDKLVDRVREIVGEAPVQYARRRFFEERRWGS

SEQ ID NO: 1122 - protein, 94 aa, Methanopyrus kandleri
VSSETSELDEYRETFRELYYEEALKGFRAHLTIYLIGCVAMVVMNLTLTPRVIWVIWPVLGWGAGVYCHYLGVRRAERNIRRLEEEALRRVQGP

SEQ ID NO: 1123 - protein, 329 aa, Methanopyrus kandleri
LRMIAIYDLGWFSRALLADATVAVIGLTIVATLIAYLGLGGPLRPSLAVGAAAGALGLVIYWYGTLLASSCRIRGVGRTDWGVVVGVKCRTSSVAVVGILGEGEIGVERGRIVKRETQYGLCLYKLVLPRGEGLLWVYGQPEGLVVATVGNGVAVFSDDLPRVLYLGVIATGSLLEWFLDVVMPFSTLADLAMEPAWRIVRESSSISCAPSWDRLAREVAVDPGMTARALEGRVALVHRDVALFFLSVLIVVLGVPVALSVLSGYGPVLYELIEPLVAVLQGVCGGTFPVLICTLLAALLVGYAVLLLTSPLLLTYVGFVTRLTADRHA

SEQ ID NO: 1124 - protein, 327 aa, Methanopyrus kandleri
VSVGPAHSFEPVHTEPPGECTSLKPLLTIFLAFTVIDHGVPLATYWQDVNLRVILEKRPRTLVVDPYCGPGDRPWTEDELRTLREHGVKPVAYLSLATVGEHQRDLYRLTRSKRLLGRPDPEWPGDHAVRFWERAWLDALRAKLKELRDLGYEGVFIDVVDPWSRDWYVEWFHRETGGDVDELKGRSYRALEELLRTARDLGLRVYVNAGDAVFDRRLAELKDRYGFGVVVENVVADEEGRPTPGNVFEAKLRALERLGDWVYVFEYGIDPERERNRLTELFSRTDVEEVYITSPDHDRLGKAAVPPTALLKRPGSTMGRLLKLLVA

SEQ ID NO: 1125 - protein, 276 aa, Methanopyrus kandleri
LIVVGAGTFGCRVAPYVASAFEASSVVLVDTPDGIQSGEELAKKLGLQTSRVEVAYGSPSGAHRDYETAMKDAEKSEALKQLSEKFVEVVKLEYRADRVPVLVWGLGGAIGAATAIRLGEEVPYALHVTVLPDYRSEVEPVRRLLFNAKKQLQSFMGRLKRHPVIIGDFAGVPADKVGEHLVCILSRRHEIVDKRRVQTANYVRDGDDEIRMAFLVDVNRYGLQRVQLDRIISQIQEMLEWAEDFVECDLAGRIRAARLEESLRTGIWDNDWKEAS

SEQ ID NO: 1126 - protein, 95 aa, Methanopyrus kandleri
LFIGVLLAPTVNLLLLISLVKLLHVKCSLQGAELIARIAPMMTLGVVPAVTVEARSLLTRIPPTATVERILTVLNVPAVFVYAFSFFILVHCYLS

SEQ ID NO: 1127 - protein, 364 aa, Methanopyrus kandleri
VRPLIAHVVGIACAVSLTSVLPILPLYVVDAGYPRSFVGVMNLVHNVTQLLARPVGGALTDAYGPRRLAPLGALGYALSDLLVLVPHPGTLLASRVSLGLGMGALWPPLLSTVADSGRSLGVFNAVTQLPMVLAPPLGGYLYRSVGPWAFAVLALPALLAVPLAGSLPDVRTSREKVSPLEVLKRSLEVDRELFRASLPAFATAAVQPTIESFVPLLLKKLGADPAQIGLVLAIRNAVAVTLQAPCGWLADRYSPTVLAALGCVLAALGVLVLPFVESVPVAVVLLCVGGVGYSLAQPSSLKLVAEVSGERRGLGMGWWGSIMSLGRLTGSLPGLLADVSLSAVFYISGAIPLASVLPLLRRPR

SEQ ID NO: 1128 - protein, 265 aa, Methanopyrus kandleri
LRLPAIAAGLLILFAQPASCLKVAVFAADDVEPTCLKAIEKVLRDAGVPFDEVKGKDIVDGTIVERYDVLILPGGAYSERVVHHPRFIEGLKEFARAGGKIVGICAGAITLVKGGLVRAKVEGAGLGVGKVTLELERDPLTEGLPDRLEVTYINGPVMRSQGAKVVARYAGGIVSRGDAILVDRYGKGEVIAIGPHPCHDERGNVNTQGAKLLLNALGVKKRVKSGKVEGEGWFPTPVPVAAVILGLVAALGVRGLISRRGTGVK

SEQ ID NO: 1129 - protein, 95 aa, Methanopyrus kandleri
MTARRFRPGTPVLLPVIRFFGRVIVTPFCFTVGREPVPCRVVVSYGRGAGPVDFRELKVESVNFPMCPVSLPLAVGFGVRVLGERSVYRRSGRHS

SEQ ID NO: 1130 - protein, 295 aa, Methanopyrus kandleri
VSDAHELALRRRLKVDLSLLKRLGLEGSVVRNVRHPLGLLVKLAEEELVEPGRVHAHLPLYTPPISTVLRLLEASEEVGYEVTASVEVIAEDDGRVEEVREVVDRVEPVILGLPGVLTLSDRVFELASERAPLFLDLGWALHPHRAVPSVDLTTVPTLAALRAVESVSGEDAFERVVAVARLGHGLTVDRGKVRGSGGGGLKLVDVTDVLRALSVVLDLARYPVAPALGPTVRRELERLLDGFDGPEREDLTEAARAFELLSNLTPGQTEEDVKIPEHPSIIREVLEDRLRDLVE

SEQ ID NO: 1131 - protein, 135 aa, Methanopyrus kandleri
MDVDTEELVRMAEWKLSEAERALEEGPESPAVAEAHQAVELLVKAALRELDVEPPRTHDIRRLLGVLTTELLDLGEGDLAVEVRRIAREHRDTLASLLEGYFSLFEPPFEGDAEEVVRAAGKVFEDLRRILEKVR

SEQ ID NO: 1132 - protein, 76 aa, Methanopyrus kandleri
VDTSGHRWVLVKVKYFPAWHARGGRILMGPGGTMIVRTGSGRMILYFAYPIRLHALGALALALQWINAPVRAMMEG

SEQ ID NO: 1133 - protein, 285 aa, Methanopyrus kandleri
LPEYPKPGTVREAVYVLSVPGDRATLDLVFDVPPWARVLDLYLSAGSRVLGAGMVPRSAYSGLDHYVPAPELPGFVRLELAGERTERWSSDRFPATDPWLRGLLKRHGLRWTVVRYFLPRNGLFWARCEVPLLDGFVVWPAPFVGGYYVYGGVTEARLVPEGGPDRRLTFGPLPPLSDLDATLVLVLDGPPAVVVSSRGFHRTVLVFRPVGASPEAYRYAADPLRVALGLLGGAVSLLVRPTVPKALAALLVLVPVAGLDYRWPWLTGWATLGPAVLFLCLLHVL

SEQ ID NO: 1134 - protein, 370 aa, Methanopyrus kandleri
LPGRVPKDVWLLGAVSLLNDVSSEGIFALLPYYLTALGGGPALVGGTWGGMELVKSLLNVVSGRVFGRPGWAKPAVAAGYGFSACMKLLLALVRDPVTAGLVASLERVGKGIRTPPRDAILAGLAGSEPGLVFGVHRALDTSGAVLGALLAGVLLTYGVPAATAVLAFALVGFLSLVPLIPVEERLEEGSSEGEGRGRFPRALAIVGLYRLGAVGWMMYSLRVLGVQGPAAAAFAYAGFSTLHALTSVPAGRLSDRFGPGVALCLGYAMTAATALLAGSGLAVAAFMLYGLAYGVVDAVERAAVAELSGTAASYGAYHALVGVGSLVCGLVVGWLWESVSPWAAFGYSACLTGVAAALAPVLILRRGSGG

SEQ ID NO: 1135 - protein, 209 aa, Methanopyrus kandleri
VPELVESHVHVPIPSDPVERIRALRVLREVYRRGKKPSLEVTYRTVGGSTCGPYYVARWRKDSRFKHGRTLYLDKSENESVSFVEWLVSLDRSEVLELARHLMRNLRSVLKTLLTEVLSLPYKKARRVLTRGLALAFDARPSNSPRIRDLLEELPDRLESFAVRTLGGWPAHYSSYLRKVIRSRRRSLDGRHEVPDVELELERWKLRHG

SEQ ID NO: 1136 - protein, 122 aa, Methanopyrus kandleri
VSGRDLYVLEARINRRNYREFVSRWREWGERIARVARRLLGEGTRVFVFGSAVKGEALPGSDLDVLIVSDGVPEDLEDRVDLIREFERELDLPERHPIEFHLATPEEYEEVWRVLLDEYEEF

SEQ ID NO: 1137 - protein, 73 aa, Methanopyrus kandleri
MRRLRKKLLERAEGSLEAARWLLGRGNTDLALVMAERAAGLRIRAAQILLAGEHARGHDLRDLRGRAHRRVRV

SEQ ID NO: 1138 - protein, 57 aa, Methanopyrus kandleri
VCEHAKALDVLGVAYTECRYGAWEPSEETLEWAIGTVEELFELLERVERDHGPASRP

SEQ ID NO: 1139 - protein, 79 aa, Methanopyrus kandleri
VIPAVVGTGVGAATVLGSLPPYCGWLAPAAMLTGFLLTLKYERWVRDHRIVTVWGRVVETVRYYPWPSRSTRSAPGGGP

SEQ ID NO: 1140 - protein, 146 aa, Methanopyrus kandleri
VVAILAPQLVVTGVTAYGLFILHIAWERRRKRAMDVLRGRGVEEKKPRSWEEPEEFKNSRCDPVTRLVFRPDLINCAPSGYLLVVSTMGWVALAFTYEMSVLLGGHSPPSVRFELVSTFAGLLVFSYRSDVATLLPGFRSPRSRGS

SEQ ID NO: 1141 - protein, 170 aa, Methanopyrus kandleri
MRTFQFHPVTTAVLRTPELDEGALFRLRDDRWVEVASGDLPGTFERFFRRLGEARSEWREGVLRVEGPPGAEVVLLVPDPEGFPVTEDSTFLEDGPLPEGAHVLLGERVRAFRTHVPWRVRLPFEVARESLVSVRWVEGSTYYEHSDWAAHDWDRAAVSHPARPRPELRV

SEQ ID NO: 1142 - protein, 304 aa, Methanopyrus kandleri
VSTDDGWIVVRVSSFKYHRVGIVTFGGHVEVDAWRVHTFLRDEELAERLADVLPGRGELLACEGLLSSYHEVFVRPRGDEIRIKPSPGAHTIVLVSRGFVLTRKPERVRELRARAVLAVAGLMEGKVSVPKRWIKAFVLGSRGRLAGIEVKSLAYLGFEAIDGIPPIVGPSTSGLIVLSIDAWDEVCEKLGVGWELEVDIKTVLLILTISYFVAVGACIVRTLRGGREPKELHYARMWEELEGDSNGVGEATIADTRKEEDSEEDVEYDEPGKWIRKHRRFKSLPDYYEIAGIRRRNGERSRTS

SEQ ID NO: 1143 - protein, 402 aa, Methanopyrus kandleri
LALEPGQIIAFITLFSILFSIIVITPPLLVVLARGLARREARCRRETLDDHVILRSYPILIPPGLSMVSSYIVFLISILVECGVCIVTKEKHLHFLRLTAILIIVTITASLSLWLAAMTPYITIAKVLPSNHKIRIKLFTITYQPILIASFSENIHTNNIQLELKTRGSELIKYSISKRTERLLRTLFSTLDGVERVNFYLGVLKPGSSIIEVKHNPENGNIVSVITPGITLTTSQSNTNLDKVYNFDALATVTLPLLLGRNSYTSTLRDIEEKTNVSLDRISLLEWLIEFAVVGSKGVSLVESSHRIVKSNGLMLLSSLHPAFTPIIVYVLSLVIVYYIICTILKASSDPLHAILFYVIVPQLASVAVSTGISLVISPITSKRKVLDLLTEVMYLYKARRG

SEQ ID NO: 1144 - protein, 246 aa, Methanopyrus kandleri
LIEVLTVLLAHDPTLMDPCTHGLEVVVTGVRGAGRVGGGREETGGVGKGVGGGGRGGKVGGGGKTVHPSELLTKPKWRFLRETLGGGVKARRAHAFRWLTRAYHPLRSYYLSSLATAFTGLCVGLLAVPLATRARRWRPETVAFAAIALIVTVSTLCWEAFLGYLASCQFLARVTEGDAHLALSEFRTWGITGVGYLLAVYAVLASLLACAAWRKLGGRASLRLAPLLVLPFLTGLWFIRLGLAVA

SEQ ID NO: 1145 - protein, 300 aa, Methanopyrus kandleri
LMLCLTVSSALPAALTLGFIGFPRMRGDRRRLSIALLSLGYCEAELITDGEVEVSRFRELSSYPVRYGEAPGGQPSNLRIRVGYFRPGPCKVEVRDCGFLFLRTRGVCVLHDAQGLLKDREKAFHLLRWWEKFSMVYAALCLEKEESPEPEEVDGLLGSVVNNRAGWNELVYLNRRFSLTDVLRHYEVAVSMLGTGVCCLVTPAWVKLIGVKPSLKLLHTWWYLAPAILLIPPVSALGVFVINLDTALRSWRLVREGRVYESVLGRDPYDGKWYGKWLSRDGDPIASRHRESESDEPQSG

SEQ ID NO: 1146 - protein, 162 aa, Methanopyrus kandleri
VRAWLLRVQAPPGQRIEKLVLLDRPPRARVWLLGLTYRVGREYHALLEPGKSELLCELKVRVKLDDQAIDLTEPSLLLIHTTRGDLEYSVIDLRNPVLPPEWKRAPPVNEITVEYGPKALRTIKLESEFYLVVLCLPPGFEYSPEDFTKWAQALAGLKDEVK

SEQ ID NO: 1147 - protein, 1632 aa, Methanopyrus kandleri
LRVASVIIWLLWISPPASGYVCWSVPVGESVTSVESCGDAAVLVTSSNRVLVAELDASSVRLSEVLNFHLPSGTKVVSVMRSGLGLVFDAGRILDDGIEVYRGVLTHGDRGWRGELVRTVAKFEEISQRVKSGEWRVLEVSNLASDRTGGLYAAALLESVDGDLIVEVWNLPERSVIADFSATEVRRLAIGDEGTLLVACGDGVAVVDGRNVRFVTVPGVVIDMVGRWVLYEDWLGYALGEVTTSGLRELVRLPGPAHRVTVWSTGGDAYILAYGGNIVYVVDPEDRTVVTVLDLPGRVEFLAPPFVVYSGKIGVLYLAKIMVQLEEGLCPAVKTWFVWLDWCAVYIVDRKVPAIYKVVEVRDKLGPNWIKTRSGGVTFWYKRVFLKRVWPRHPTELHLDDIGIVVIGERNSKIRVYCLDERTEEVLKNLLRSPDVCDILNVYPGSAVFIVDFKWRDQRIPAFRFVRKSGWLVTGFIDEDDVCPNSDYDDVVLSVPISPLTAAHSGMPVIPLLYGKDWVLLSALLPNFDWCWDKTSELKVFVNGKESEFYVVDWSNKTIRGPFTKLKLKIGKDKQLFILLRGLSEPESIRIVLKRPLGPVYEGYTEYAPPKVSISRPSARLVEYNAKEDKVTVAVSAEVSVRNTVIRRLTIEVFDLFGRTLTRKVMGPLPPGKHHIEKRLSFMPPEHGPLKIILLAEYDGDLVIVSDREFVLRAEPERAELTVSYERPGRLTARVLDYGRDWVELRVESEEPGNLHLEDSKGRPVPYYVLEGNELSGPYDGEHPLELGTTPVILILRDLKPGEAYRFKLIREGRIPTAFELECALPEANLDVELLSGTLEGRSLTLKFSVRGSTVNSTFKRLNLVLREDDRILWREEVDLDNTTWFDLPFETTVEVGGDEGTLTLEVTAHYDHDTVLPEGNEFEVREAPARRVLRIAYGRPHVELEDYGLNWLLLRILPWRPGDLLVRVNGKPVTYYVKHGNEFEKHSEDDPYHASGANAVEVLLYDLEKHGTITVINRSSTLSSASTLDYALPEGVELAAEVVGGRYLVDEGRLTLNVRTLVSPIDVTVRRIIARVLDDLGEILGETVKTVELGPGIHELTLPIEVRVHRECGRLRLQALAEFDHGTIVRDPGEGPVPNPASRTIEFSYSAPSVRVVDRGIDWVLLEVTTREGGELVVHVNGRKAWYYLKRSRGGDWEGPYDPTSVGPNRTVLVLVPGVPPEGRISVVLGGRLERVRSVEYALPSVIARVDVEDVSVSGEKVIAMISLWLEVLGTTVRSIGVSVDGVKSWSVSALEDGEPLRLDDLELGEGVHLVRLSIKFVPKERAGTVPVTLRVQYEGDSTFDPGRREFVESPLVLTLNVPYVLPQRQTSKESGPRGGSPKVPERGGTAVDRGSTTAGESGTGRSAVTEPTHASTRVERRPSNEERPHVVRPTPPTRFPIRPVRTETGHEVKPKPLEKLPEALPHPSSSLPDTLEARLTPVLVSLFDRLWDLLTSLLSQPTITGHAEGEPTAKVTRRPIEHAPSEPSRPRTPTGSAALQGPPHGTTVPQGYHRVGALSAHAPHTFREVEILKTRTRGYAYAEGTSRVSRSLTRLPPTGVNLLALLLSVFGALTGLYLTHRSVRGGEGGE

SEQ ID NO: 1148 - protein, 1849 aa, Methanopyrus kandleri
VSRLLPVVLFLALVSVVPVGVQAQSFKVWVEVEPSVHTFLGASVYLVDNEHKALYSLGEYSTVMEKSKQQTQPRPLYPKDRSEPLGELDLDALGVAVSCWFGGVGCSDDRTMRTLLQVLEMDDEVRARVLGNVCPTLTMFGNVPVHVTECRVERTENTLTFKFTHYGITVRIVKSELKVQVTDYGRDWLLLHVEPPSSGKLSIEENGETLAFHTLTSDGTLSGPYTVLEVEEGRPLDLVVKDLEPGEKSALDVVLEDDLGITVRKRVEYALPLVNIESLTVEPGNPLRVKLRLSVKNTMVKRITVRVVDCTTGGVLTERAFDVGLSEGEHELEYSIETPNTTDPLAVFAAIEYDHGTTLEGEKFEPVETPAQDFTTIVPSTGTPEVMLDVETPERAHLGLPVEMTVHVRLGRIPLSTGEIRVTTEDGKTLARTTVSNGEARMLILPTHTGDVELHIEYYLGSRKLAERELTLHVSNEFHGFTADIVSPGNLGSLGYDLRGSYIPERKYPAKDEPMLYIYRTWWDEYYPFLVQPADRPNALLANGLKITLPEPADTVYMLTLPVRVHYPIRVTIEDSSGERVTRKLWWLNWDWQWWWDHGWSVYHLRLTARDLGLKDITELEFDVPNGLLWILALTYRSGDAYKALIEPGKGVTLYREPGPVEIELEGWPAGSDHEVVWRKVGDEWIPFYLCPKDHPNALPADHLLLHIPHDADRAYILLYAREDTTAEYGILTLKTTVPLELPWKSNVPRSDDFDHLAVLEIPCKPSSLARSRGRVLLVNAPNAYVIAITYHLGDKYEAHAPDGEKITLTSKDLPHYHNANILRETIDSEEHGLPPELWHEGVAYHWLPVPGTVLHVQIPFYLAPKDAENAIKVENDLKIQLPEGTKAVYLLYIATDQRDPKDRPASKYHLEITLDDGRTVQAIVLLPDYLALTRDPSTALLAMDYARTNPTGLILITQRPAWHLPVLLKDDQPEEAHAYAWVLTIATGEEHTIRELTLHPPETGRLYLLAITAQAKDARLYAVLGPGQWVELSPPGEVWHGHTVDVVHPGETREQLPIEAWHRRVLVKTPDEAIPLLLARPDGPNATPIATRESTLNIILPKPADAVYLLYLATDYEEASTPPTLPLLALLDDGKLTGTLVRIAPADRKPSDLLPALAWAEPLVEEGEDLTVRQAPVITWDRVYKPTGTVVLEGRTAWLLELKPEHGRIKALTFLPTDTRLTVYLLAVTLRIGDYYYALEGGKTIRPLDAGEADTTIETAWKPERAPELPRTFSWPGFSVDPAEKPYDYRHHVRVLEDEVVITLGDEPVPVRLTGRLAPVVRREVELPEPADAVYLLYLTGHAPSTSPARLLVEYEDGGRALVLVNLASEVGLYESPARTVSAWVRPVLGWHNGAPTVVQQPALELERDDGKRVRAWFLKVQAPPGQRIKKLVLLDRPPRARAWLLGLTYRVGSEYYALLEPGKGELLDELKVRVKLGDQAIDLTEPSLLLIHTTREDLEYSIIDLRNPVLPPEWKRAPPVSEVTVEYGPRILRTVKLEGESYLAVLCLPPGFEYSPEDFTKWAQALAELKDRVKQDEKDEKLALVVLTSSLPILEAYYYDQVISKLCEDYKASWVRILPGVIIAQVTIEKRSDNKVRLGLSLDTPTVLLGVEFYADPVTQRALNTRASILTQVIENYVVSKITGEPYYSEEEWALLPDNVRQDLEKILKELGVEPHGETNKQSSIQELIEGEIPEYNPTTGTIEIEVEKKKGVAGVALWLISTWLSLIDVASSPPHEWWEWFLLGLSMGVIGWLGTIHIGFAIISIGISIFIIWYEYREYGSTPSPFGWASLAISIGSTIKDIMKML

SEQ ID NO: 1149 - protein, 245 aa, Methanopyrus kandleri
MIYYNDATGSALGGVLMSVRTVSLLTLLLLIAPVAADIPPHASEKELEDPNWWWEHHRGPVWATRYPEVWNKIVLKYEDPEDREKVSKLGEALRHPPRGFELWIWFILGMALVLPPASRVGFLKFFKYKTWEAPEWLIQYCGTIILSMAYLAIIAMGRAYVLNCSVYYVMIGKLSEAYRTFYLWTAYAEPFLLAFNAAIPLILVSKLELPYRRLKAGILIAWLASLVLNVHMHSESLTLLSTLGG

SEQ ID NO: 1150 - protein, 215 aa, Methanopyrus kandleri
LGHSVVLALSIIFVVALCPCHAGSWSVDPEIVEHPWLWNRYVVSKYHDPVERSKVVGLREELLDYRKARVTVVFLCTGVWVIGIALLLVKNRRAPKEALTEHFFRLASPLGFAGLAIVIASIGEFNALLALSKGEGYRVAVETIRAYGVYGPAVIALLAIAVILVTVSRRAPKVDLPFLPKTGLPLSRVSAIIAWTSVLLTSALIISYTVELFSR

SEQ ID NO: 1151 - protein, 298 aa, Methanopyrus kandleri
VIVVITAAISLQPKASHATLAATEFLILILALSAVNYVLLPLLGFGAVWVFRVGKRLYLVSLGYCEGETILEPGVEVELSGFQVLAEFPLESEYHGRLWIRIGYFPPGIHWVELPERGFFFLRTRGVCALRDPYLPRDDEGALEMARFLEKLSMVYAAVCLEEGGPNPGRARKIMKHVKNNSRWGTTVRYFGVKVPLGRFTTSQSTTVTVAVLVALSLVSALARGEPLGPMGAPILVLSWLLACVLLALPVAWRNRRAVKTGRWYRVIFERHRVEEAIDKARDWNWFPDLERVDPLED

SEQ ID NO: 1152 - protein, 144 aa, Methanopyrus kandleri
LGRVVRGLLMAAYVGLSLAITWPFAWRFFRWCAPYAPAAYTVSELVMMVGTCGILRSAIPLAAVGWGDVLNVAVVAICASYIPFCVCWIVFRVYLHCCGTALPDGGSLMTVLGAVLLSTTSFQVLWRPEGRCGSCTVRWTSAGT

SEQ ID NO: 1153 - protein, 419 aa, Methanopyrus kandleri
LRGLTRFAERRLRWYRRAYWTLCPAVVLFTGLGWEEAGLLLMGFAAFAGAFYGIYREETEGTFPRSEHSRRVGRTLMWYPTASFDRVLGGLTPTTFLPLFPALLYFITSVARHPDFLHSRIAVALFFLGPLPVLLYLVRYEVASALGCVRVLRVRGSRALLLSLGYCEAELVTDGNVKVSGFRELGSYPVEYGGLPGDPPGDLRIRVGYFPPGKHEVEVRDCDFLFLRTRGVCMLYDSRGLPEDREGAFHLARWWEKFSMAYAALCLKEGGPPDPGEAEALAAGAGDNARRALTVTYFGVKFPVGKLVASEEAMLGVVLGMIPIATLVRDLLPPDLSLLSAPIAAPLAGVLLALPIAWRNRRVVRTGRWYRLLLRGDHVEKLLPRLLGEDLWSRRGGMITTLWKVFDVLERERRQHPPY

SEQ ID NO: 1154 - protein, 276 aa, Methanopyrus kandleri
MRTSTPDDRKLRDCTAEVGVLSVLGRIVVSHRLLESLGSDDRDYLRYLRCALISDLVACVSLLGVLEIYAFSLTVSPAAIPVAIPAILLLAGMTYLLKTLLESSPLAGVVDRITYHMCILSAGTCDPVISMQLQPPGDLMDIPPYAFGLVYGLTVLAPIILLFGTLMPAGAVLEPFEYPLEDSPIPGLILVADIVRPFTLCTVILDVLSEVLSAVLLPGEVVRKAVAALGRSVMSLLGIGPSGEGARAEPAGGSGAPRASLNAHRYSLWNPLQITL

SEQ ID NO: 1155 - protein, 147 aa, Methanopyrus kandleri
VGCLPTVLAALAAIFVVGGVATATDDTYPHHYVKFRIEPKIQSVEVPSEVVAEGGTAEVPVKVTVTWTGNYPCTIKRTPTRMTFAVDGNVVNTQMITPPYKVGDTRTVSTTLRLTPGEHEITVTVRFPNLCSTGSPVEPTRRASGSS

SEQ ID NO: 1156 - protein, 207 aa, Methanopyrus kandleri
LVTSHVPIPHDPVERIRALRVLREVYRRRKKPSLEVTYRTVNGSTCGPYYVARWRRDSKFEHGRTLYLGKPENESVSFVEWLVSLDREEVLELARHLMRNLRSVLKTLLTEVSDLPYKRARRVLARGLALTFDARPSDSPRIRDVLEKLPDRLESFLIRALGSWPAHYSSHLRKVIRSRRESLDGKHEIPDVEFELERWKLRHGRRE

SEQ ID NO: 1157 - protein, 405 aa, Methanopyrus kandleri
LGDPGASGCELPLVSRETVSRLRLAYGALCTLSAPLGLLGSDAGVMVAGLGSIVGVLLGLMRPFSFRERAPKPEHARIGTRLLYPTASFNRLRDGPKLGTALPLAMIPALILFFTMWLSTGDRTGVALTVFLLISIAATTVFSYLVKLSAAMTLGYALPVRVKPEGTRVSLASLGYCEAELVTDGNVKVSGFRELGSYPVEYGGLPGDPPGDLRIRVGYFPPGKHEVEVRDCDFLFLRTRGVCMLYDSRGLPEDREGAFHLARWWEKFSMAYAALCLREGVPGAVELERWLERVRNNRAVGFLVRYMNCDFNLPVVEMCVLVLSLLPMTEAVDFVLTRGVRGWGALDAMVVLDAFTLCLLALPVLCGLLLNRRAVRSGRVYECLLEGEPPHRRLLSTLCVYNPSK

SEQ ID NO: 1158 - protein, 277 aa, Methanopyrus kandleri
LVCGDPRLREIVLEFRDSVRVGSSRVGGVLRKLYPILSLYVILSLVFEGRGVVRVLWDRASAPLAMIVIAGACIAPILAAYLAFHGYLTLEARRRLRAPVVTRPHNPTLLLLPFLLALLRPDYYVHHWPETRVALAYLYAGCALSPTLALAVMWVLRTRVVWCWKRDLDEEVLERFVEGLPDGRYVPGSLIPYASNVGTLAVAIAVDAPSLTPYLITAGTLSVLALTTYISTFTEGDLLDILGKLRSGPWRDDSYVIGFTILILERSFWLIIEHSHP

SEQ ID NO: 1159 - protein, 288 aa, Methanopyrus kandleri
VGIRGSRGVVSEFEGSLKREPDRWWFTRFLHEHPMLLSTSLALLTLPPVLTAGRTVWELSDRPHDPAALLVTTSATLAPALAVYSALMAYYTLRARYLIRAPVVTYPHHPAYLPLLYWLPSSRLLTHWGEPKVRLGFVVLYTTVVLLPTLSLLLTWICRVRILWCWRGDIDEGTLARLLERLPRDYTYAPGCVFPALVAISALPGAFGYLLLKGTWSGWYVLAIPASMIVPMTVLTYAVIRKMSRSPVEELTDEWLGEGNAPWRLDLQALAILATFATWTLVDVGGMR

SEQ ID NO: 1160 - protein, 221 aa, Methanopyrus kandleri
VFSARQLTQPLHVLPSIILMYLPIVSIPHAELTDSSVFLTFLMIVLGVVFVVSISMFLSFPFAMILRVKDSRVWILSWLYCETELITDGSIEVSGFREFTSYPVEYEDLPAGSPRDLMVLIGYFKPELHRIEIRDCNFFFLRTRSFCLLYDACLPGDREEAFRLARWWERFSMVYEALFEDEIPDEKNIMKYLDGLYQFKAAHYYVPLPRWPYDEDRDARD

SEQ ID NO: 1161 - protein, 232 aa, Methanopyrus kandleri
VIPGWYVGAVLVPQLVVTVVIAHGFSRKRRWERLLRRASREEVRRSLERTPGGGTVRLAFVPELLWCVPGRVLVLGSTGWLMLAVLYEFELLGLTRIVPEAKVRGLLAAVLALVYGTCAVAVLPGTPRPALPRLLAPAAVGGALGAVAVLKSLPPWLGSLAPVAMLVGLSSVIGYRGRLSASGGTAWDEVVEAVRYYPVSALSVGEREAEAAEKCALWFLACRVVEGTRSVG

SEQ ID NO: 1162 - protein, 207 aa, Methanopyrus kandleri
LVESHAHVPIPSDPVERIRALRVLREVYSRGKRPSLEVTYRTVNGSTCGPYYVARWRRDSRHKCGRTLYLGKPENESVRFVEWLVSLNRAEVLELARHLMRNLRSVLKTLLTEVSSLPYKQARRVLARGLALTFNARPSNSPQIRDLLEELPDRLESFAVRTLGGWPAHYSAHLNKIIRFRKRSLDGKHEVPDVMLELERWKLRHGT

SEQ ID NO: 1163 - protein, 178 aa, Methanopyrus kandleri
VPVAYFDGKPAVKIRFARVNAPEIYHPSSEEEYRLGLKAKEFVEKKIRDAGGYVKCRAYGLGKYHRIIADVYPDDEETTLSELLVERKLAEYRQYPEPDPLPRWFPREFKAHVAKVVDGDTIYVYARNGEEGPVPFEEKESMRGTVVGEYKTGTPTVPVALAVISAVIGVGLLVSARR

SEQ ID NO: 1164 - protein, 315 aa, Methanopyrus kandleri
LATIRFVVDGIVVEGNGGRLEFDPKTTLMKGDAASLAGFLVWLDGLFEAGVRLVRRMAEGVEPVVPEGAEPWVEPPLTLPVSGEYSRVELKGLIAGIVESTKDPWTVASRAARITEYLSDKGAVRILHGSDPYDVVAVGVLALKDGAVRGTLETVRSTVETIAEGARDLIREDEGRADEVISGIVGNVLLRLGYYAVNVRVTDRDGRVHIVRDPSTHADRVAVGVPLTGEVLYGTLVPAAEVGLRCLERRDWVVNAIIAERIRRLGLRTVSGSQVVTIDGETLRGDELEESATEILEEGDVERGSRLERPSEPSG

SEQ ID NO: 1165 - protein, 413 aa, Methanopyrus kandleri
MAAPLKAGVGVSKSSPEEALEGAADWGLDRIDAVLCAFSPRHDPHEVREAIVEYLEDDRCLILGLSSAGNITTDGFSDGSVAILAMELSKLVAMGMAIGTGLSEDPYRVARETVTEAAKSVEVDVSASLAPVATKLVTGNVDVTRHSLVDALLFTDDLCCLNHPEALMEALRGVLDCLGTVPRIVGGMTADEYEFERTYIFDDSGVYEDALAVLILYSSVKRGHAVDHGFVPSSEPMIVETEGVDVIRMDGEPALDVYEEVVGEEIGMETLLKYPLGVEDPGPRPYHLIRTPFEVDEEERTLKLVAQLPSGVAVRVMEPGDVEDSFKRAVQRALEDAGSPDELGAVLVFNCMARHLIVDTDDAVDLLRDLVSEDVPIFGFNCYGEYGLTPSGKFVQHNQTVVTYVLGSEVVGR

SEQ ID NO: 1166 - protein, 241 aa, Methanopyrus kandleri
VGARSSSVGSYPTDRDPAVREGAAGDRGGAPGGVRGPESVGRGPDAVWNVSDLVVEALWSSGLVYVDVSGARGPEIAGIPLGLAALEVPGLSVGGGREVRFVAGRLEDDVLTDVTEHFGAAGALIWTIICSWKPSPEAARRAIEPAERAGVDVRELDRLGEYVDALDTAQVGEVLAGTRPDRETIRTIVRILRRVLHRVYATDGRFAPPTASPLSGIIRVHSDTPTPTTCGAVTSPREPGT

SEQ ID NO: 1167 - protein, 311 aa, Methanopyrus kandleri
LRVGIAVLAALLATLGAATAAEYPIKGEVTGTFEVHVEADPGTQVDTNEYAVVVGSKYVYLIMVEEDDLQDSGKFKTQPFLVPVPADKVEVNGSLVKFPDGLDDTFAAYCLNPMGRHPRGEMVVPKWNEIEDRFVEIKVVAGHGQVRTEERHLAPEWIKAVCKRVEGVVDPGEWKRDAQTIIWVTEAAVPENVQVNVENRVQIDVNATVQVNAQDFFQINESELRELANAGDEMARQLLEFFSNKEELENLVNTAQSALDFVKQHLSDIVTTAQTAKEAYETAKSVFGKIPVSPAVIIVALAALAIFRRRP

SEQ ID NO: 1168 - protein, 286 aa, Methanopyrus kandleri
MTSLESELREALRERRLRKKWAVVAVVYLAWKMYGKHVSAGDIRDVLESVGYEISEHAVHAYMSGLRGLIGRRKAGRRTLYTVRNEEEMRRRLRDALRGSVGRISSEEKEALIESILGGDRGRRDPEVENLVLIWRRPTAEYRRRIASSVHPGSRLREIPGVFGTFEGIWGFGSGERVGWESLGEGDVLLFRDEKGEDRYRYCGVIASKCNDPKVSAILWGDDRWERLVTLAEVRLVSLPASELNELLGYRAGFRPRGAMRVDPDRVSKLVERYGGVLEFLREYEE

SEQ ID NO: 1169 - protein, 441 aa, Methanopyrus kandleri
VTEPLRPPELEDPKRVYVPVAGAGIATAVCLYLILPRGLFPALLALAVTAILLGVGTLVFRRYLGNQVELTPDAVILKGPGGTRRIPVEDILDVEERESGVVVLTKDLERVPMPFDSDRLRHGLRILLAHKKGSPGDAVVEAVRELGELPILEVVGGTVFARWRWLRVPLYSPGDPRLEEFHDRVLEAWMECKGLGKKPPSPEMVAVTAILPTVTPILAMRKGAKTSPSGRDYLGKLIHWILVKVAKALKVSLWAAATIAAAIYFGPGATVSAVYWAIARRVDSVPVPKSRIKHATLTFLEYNALLTGLLAPVIGILYLPLPRVHCPRLAIALALGAVATMAPSVRAVSHYRRDPVGYTAALLNDGILVPEVVLIGAGTSVLLLVLVGAVPAALTIVATFLFHAVIVLRRIERAAELSRRAWKLRVSRDGTGGNIPHTGGS

SEQ ID NO: 1170 - protein, 223 aa, Methanopyrus kandleri
METSRVRFLRYRTHLLLTYVIVAYLWDPKHALAAALGSLLPDLDHPSSVASRALVPLEKATLLPLRRLINTVVGHRGILHWPVPWALGAFLAWWVGHTGLAAVLLGGCLHCLEDALTVRGVPLLVRRDGGRWRVWNLRLTPVPSDKWDAVLPPATVLLLCLVILACPSEFHTLGLDRIPGLEKVYWTIHERVYHRLLHPFDAYVGTFAREILRLEPMAAFAPC

SEQ ID NO: 1171 - protein, 290 aa, Methanopyrus kandleri
LVAHRGRLFVETDGKLLGSCEASLIVTEENVVVVPREPIEGVDTSDLVVESVASRFDSAELEEGNFTPPRSRVVMTPPTAASMIDLGLALKRFEVDGVTVLTVVGPAPAYPFERRILAPEGEMTLRFEPKDPVAAEGSLRAAARAAVEGTVGETVGRSKAVRLCKVLVELNQTVGHGTLRLVPRDENVLLVLQPEEDIAEEFKDAVGKSQIGIALTPPELSAVFSGKAVVKHGKEDTVHVLDARKTIEFRAEGKGWALRAVPTDVIAGSTARVLLRTAAELIVHEGLRPE

SEQ ID NO: 1172 - protein, 240 aa, Methanopyrus kandleri
MRSFPLLPVALVLLPAAAHAGKISVTVYPESVNVQGNALGIHERLEKELDLIVTVTDLGTGAVYDMKFNPLEPSSPAGLDVTGPVTVIATVRYARNIVTRFNVWPEGASSFSSVDVPEGRLETTVNHPRISVPSTGTFDVECPITMSLRTDKGTVTVKLLLHVSGIDVKGVKAERKGVLPELPSVVRLIPVAVALAPMVVIPGFILIDLTLNVLNGLKSTLGPVLDHLFGVLGGLLPRPG

SEQ ID NO: 1173 - protein, 211 aa, Methanopyrus kandleri
VELHERHLAPSTTGPVTLYGVPIPVLIAMPFYLAAVGRGVLALKWAWRAGNTVRTASIVASFAVLTLLYLSVPTVTVAAITLLVSTVLFYLFNTFIPRYDRFYVEYRRRWGYDEAPKHEVLELARECRLDVLPPALKLLNGTAYLAAYNERDNPNGWDPIDRFHRLLLAFEEGSWKGGYVGPNAWRIVRGVAELSLDHPEVELARRLEEGE

SEQ ID NO: 1174 - protein, 122 aa, Methanopyrus kandleri
MSVISKDPGTITVVVRVDDEALSKAYSADKGARITDWFGPVELSPGSHDVGIHLYLDGQEVRWYGSVVKVMSGREHVRDHDEYEHHREEHDHGGTTRINPRRSDFPPSGSRSRGPRDHPNSR

SEQ ID NO: 1175 - protein, 121 aa, Methanopyrus kandleri
VSVPKYLPLLIAVVATASPASGYLGVEAFVTGISADHVDVVYMVYADSDDVTKSHRVTLYLPPEATIKGVKSYQLPRREGDVDVVYGQGDWKPETGTWSETARSDPRSSFPKRPPMSSTCT

SEQ ID NO: 1176 - protein, 810 aa, Methanopyrus kandleri
VLRAIAVVISALVLAVPALAEPQADLRALGEKIGNDALTTLGATAGDPKLLVITDARAVWVDSDGDGTPDTPAAAVADAVASETGCKIGENLVFVQSKPASDLFVAVFYGDESSGKLVFYRVTHSLLDRIARGEVSVDSLTFTSDPSDENGIYRYVLGDLTAENVFRELLSAAGIDPSGYMTDGRIDLQKLDEHGWDGFDPDKYTDEALQSFNDKYFGKMCGFGFTVLSIALSWANGLPRRYLASVERHDHLCPGLISGMLIVDKLLREGKAEAVRFYVACPIWCKDDAIYTTLDLTQGKRNHFVFHPDSRERDLLNRKLGGSPAGVFVLQEGEDLKALVATFKWVNWGAVFGKLARAGWGSVKGRVLNSMIRIICDVVFCRDWNVDRVGLKEYPMTCTEAAAICAGRDPYMVLGLVAPYTDDPKVAAVEQALLYARKVLGLSYGDERAYVITNVTYLKDFVDGRVRNVITRTLGLDATFSGSNRSIQVTTLEDRIVEFHTDETADPVIAVVNAETGEGVAVVLDLAKLEGKRAEDILTMDPEEFVKEYAKAYTDKVKMNAFEISDEDNDKLSRLGRYAFNVVTLATAVVNGVPKDLLRCAAWHNHFCPGVTSGWMIAKYIQEEILAKEPLKDNERLVWIGVPVWCKEDAVQTLLDLTPGKRGEFVMQLPREVQEELKREYGIDVAGILIRYQYTGKGKDEQILGGKAYVIGFDWDKANEIRPNVQYFGHAAWAVELAKRDPREFVRVIKEISLGAEDVKKLTEDTARVNPLEVVGVIHNPKPKRKPPVYWVTVALALTLLVFRRPLKPS

SEQ ID NO: 1177 - protein, 968 aa, Methanopyrus kandleri
VLAALILVVTTLPTPAHADIGYVGYDPEDAAHWSGVGLLQHPYVAWRSGGYKTATLADGKLLLGTDSGRDDALVEVDPATGHVLRRYSLEFDPGDCSYSVPLVAHTREGTWVIKAYRTTKDERNVGAILAINIGDGATRYLVDADLGPYEVEETRVPTVFPVACLDVDGDGDEEVIVEAPSGMFCYDVTPELKRLWWFKCEPVHLPDGVSLPAILDLDGSRLLVVLDVRDGVPVLHAVDVGTGEERWSIDLTQHGVPRVKGYRSVWKVMTGDLDGDGKPELVVTLPGAQRSVQSCGLATKGSGESYLVVLRPRTDGADPVTVLKISDVYPLNSGFGHPAALGDIDGDGKDELITFFTDRLRVFKLHGDRLEQVAEVKPGVTVFWSSVCLIDLTGDGRPEVLLSGNPGRTVALRYDHGQLYVLWEVPYPAQVNLPVPVDSDRDGKVDTLVLYSTEHGIVALKAGRTAPTRGEKSEGKRRRLPLIPVPPIPRRRRLFVATLVVAVTMAAAPVTATVPLYCEDRADPSTVQALKSEVHRQIVDAVHWLAEQEKPTETEFYFPGWYYDPNPTGEPRRFSAMDTAWVLFGLAHCYKAGIERDLCLELIKKGLTALEACQDDEGLIHDVPVKSLGAGSFTLGCAVPTAPSSEEEAQQLKEWVGFYTSQSLPGIVAVYRLVDDPEVKERAKRIAYRAIEAMFKHYWREEEVTTPEGTVEIGYFQIQGPGAWSDRTRTTPLVLWAILWSGYRSWNDREVQLMWNLLRFTEKERTVRGIPVAHVGDIKIDCDSWTLCALAAVGNTVDSGPLSDLVRKLVNCIMAHTKPTRGGLMAVACHFGELEEEPGKAFLAHKAARAYYGLLQAGVPPDNRLVTEIVRFCLKAHRIDPNEKDPVTGLQGTYKDDVPYWCWTDVEWKNDYRGLKCFCTGITLAYLAEWYSLVEGNEPSCRSKTTERHRVPVTPVILPLCPRRARRD

SEQ ID NO: 1178 - protein, 146 aa, Methanopyrus kandleri
LEIEVTEGSFVSEVYHWLRKEGLPAVAQVRIPGVRGRVDLLVMDRRPVVVEVGFPGVEITDEDLRRALRYVRAIIEWNSDVEPAAIVTNLKEAWYRDDPLGEWEKEELEDPTSDLIVLVRRLARAEIETEEQKGPEETEDTDRMLP

SEQ ID NO: 1179 - protein, 317 aa, Methanopyrus kandleri
LNQGPTVLRCWQRPPTCVPEPHRLTLRNIATIHDPRGLISGTISRVLSGAESGAQGWIYGKKAIGWRERSAELELATLNNPTFGVGRLKAEEPDVEWEHWIVFHSPVGKVRIGDVELPTEEPLTVKSIEVDCDSKLMKINFKDDARSLMRLEGDDDHSWELKKCSANVKFNMSPKVEDEEVKCIYEIRAEKENFSLKTIDNVIEYLQEKEVFSCEKIWEKPEKAKSKSRVSKYIEILVEVELSNFIDKVSKVDVDYRLNGKKKFKVVDAELLVVLNKDKVKKELLERLYGVSGDIDFADEVLFLTFAPHARFKSSTS

SEQ ID NO: 1180 - protein, 299 aa, Methanopyrus kandleri
LVEWREVPVLPKNTFFKKLNAAIAWIDPFDEFANPDVKELLAGVSDELDPNPLLHWSNVLSAEHPPEEWRIPYELAEYMVCFNKAGAAVLRYFADALRNVFERPSLDRLVRPLAIEMALSDGDELPGLVRSELGIEKGYRGLGKGLPDALRPSRWLLVSVVSHACSNRKARPEEIAEEFEEHLGFELEGPEVIDRLRENVEEAVEDLVTWASREGEDPKPYVEVFREAVTATLRRSIRLVRRPEEIAKSCLKVDPTVSIGGVKIGPEDYDPLWERVRQVDVEEVTAEIVDELLDELTRR

SEQ ID NO: 1181 - protein, 238 aa, Methanopyrus kandleri
VLQALAFVLLLTIAPAAVHAGQVTVNVALDDMVSNGAELGTYDTLVSKLTLDVAVTDVGTGTTHTAEFKLSEVPKSVTFEGIRGPVTVSVTLKYDGKTALAATLFPDWPCSSATVDTPDGMLQARVGCVSQYVADTEFSTECVVAAELYPGLHSTEIPEDARYVLAKFNVKVKAEGLAHGGSRARIHLDDVLDTAMDLAELVLKYMPPILIVAPVLVFIGPTAVEMFAEFLKAILVAL

SEQ ID NO: 1182 - protein, 262 aa, Methanopyrus kandleri
MEIRKLRVAVQLISAGVAAVGVAFGLKVVVPGIAAGCAGIIDTGTMLLALPVVAAGLVTLTQLAAVALVGWVVPAILVGGAVCGWICPLVLVQDALAGLGRKLGLTVHRPPGHGVLLYLRYVILAATLVLGPFAAYKLWYKICPMHYLSYILLGRQEIGLYSVLKMSAAFGILGASVFVPRFVCRYICPVGVLLRLANGWSLLDPLLKGKTEIVRKGCKGCKVCTVCPKALDPADAFPNDFDCMRCGRCLDCPIHLKMVGEG

SEQ ID NO: 1183 - protein, 131 aa, Methanopyrus kandleri
MLGTLGFRAAVMAAILAYILTVPSHLGGVGKSVEDIAKEAIGGGDKGSAGEKDEEVSEKGGEGKGEKSGGERRPEEGSSGSTGGGSSGGNGTYAGSSSSGGGTVVTTGSSSGSSGGFVCTGNCAACPNPCH

SEQ ID NO: 1184 - protein, 118 aa, Methanopyrus kandleri
VRILTLLVAALTVLGAVSATTYYCPVTGRYFDDSTARGQHCGAFVDKNGDGYCDNLQVLSEETSDSSAETTSTSSTNTSEQQSSTASTTSSTTSSTAPVGLVAVIAGLVVAAVLLRRL

SEQ ID NO: 1185 - protein, 77 aa, Methanopyrus kandleri
VSEAELVRELIEELRALRHEIYMLRMELERLRGEVEEVESEDDIPDLLRRAERAAEMAVGDIDLELESDEEGRWSLL

SEQ ID NO: 1186 - protein, 325 aa, Methanopyrus kandleri
LESYRTLLAVLLMGLLFPSSWVVGKVRVESTGMPFATYYQNVKMSEVLQKRPRVLVLDPWCGPNGRPWTKEELRKIKDAGVKPIAYLPVCVVAEYHPNLYREARRRNLLGADDPEWPGDYAVKFWEPAWRDVLRSELARLKDLGFEGVFLDVVDAHSRDWYVRWYDRVNPHGDLRRDELNAVKWIAQTAHGLGLRVVVNAGAWAFEGDGMARLQSRLGFAVTVESVLSDGSRRLYSRSELESNLRTLSRFQGPVYVIEYGLDPDDPSVRRAAEKLFDKTRATCVYITSVKHDGIGVALVPLRRWLWDVTLGPLLGEPPSWIGGGR

SEQ ID NO: 1187 - protein, 147 aa, Methanopyrus kandleri
VSPHTSSAFGDPARFIIPRTGRPRPLPDGAPGTRVHPAGHRGTGRPSYSPLALSSARAVTIFSDGAYPPPPRNTNLRSECTPDTSNSAVPVHPQTSSVTTRQRPSSRTYIRTVAPGRASPVLASTTATYTRSLPAYQARILVGVFPA

SEQ ID NO: 1188 - protein, 568 aa, Methanopyrus kandleri
LTSAVVVEGLKKVYETETRGEIVALDGFDMEVEEGEIHGVLGRSGAGKSTLIRILRGVERFDEGRVEVCGVELTPDSPKSRFTEVKRITAIHPQREFGLWPETAAENVMRKLYWKRRGAEELPPEDSSEYEELYEEALEYLRIVGLEHKADHYAPVLSGGEKQRLLLARQLAKDPEVLLLDEPAAMACPGTKQQLLDAVRNANEEKGITVIVVSHLTEVIEYLCDSATLLEDGRDVLHGSPREAVDRLTRGMPEPERVPEPRDEIAVRVRDLEKRYALVRCGETLHMRGIELEVRRGEILAVVGPSGAGKTVLLRMIAGLELPDSGDIEVRVDGDWVSMTDLGHGRMEARRRIGIVHQEFGYVHHATVRDLLAGRLGVKSSTVLEQARRRAEELGLGEEALDVLYALTDLPREEAEAKLKELDLSPDILDELFPKFPSDEVERFARPVFEEFDLPMEVLDMKFGELSGGQQVRVAIALELATEPEVLLLDEPFGDLDPVTLRSVANSIKRIVDREKIATVLVSHDVRFVEETANRAVLVDDGEIVMEGDPKEVCREFVERSEARFLEG

SEQ ID NO: 1189 - protein, 156 aa, Methanopyrus kandleri
MHRYCHSDLIIKPYGAGRSRITVRLPGPVHRWIQREHGSVAGYVRKCLEDELTRVMLRELADSGSGRRLSTSLELPEDLVRELDEVADRLGISRNELVTCLVLREFLNEMTARRTVRSDVVCVLRELLNVLEEGWKLDLGGRRGGIEEGLRDRDAR

SEQ ID NO: 1190 - protein, 201 aa, Methanopyrus kandleri
MAIPMHAIPSRVEGIELGPLGVEVEILRESHGLLYPWARLLSETSFAVIIAVLGWTYLRDRRTSYVLATTVVGTLVVTVVLKGLIGEPRPFVLHVVSPLTNPDEPYGSFPSGHTSRSFALAAAYHLERRDALTAILWIWAALVGCSRVVLGVHWPHDVIGGALVGITVAVATHRTARLWVRFLSIVDPLARGVRAWRWYVR

SEQ ID NO: 1191 - protein, 248 aa, Methanopyrus kandleri
LAMVREVIDFVEELAPPDLAEDWDNPGIQVCPPGGLDRKAERVLVALDATHALERAGDADLVLTHHPLLFRPPRRIGGRWYRVLRAVLEADAVFYAAHTNLDRAEGGVADTLARRLNLRVEREACDGFGRLCEVPGSEEELLNALRNLSPLTTVYGDWEGVSRVLVVPGAAPDGLVMECLRCGVDAVIAGEIKYHTRAELLEEGIAVVELGHEYSELPGVQELARRVREEFRDLNVEVVPPPDITIIR

SEQ ID NO: 1192 - protein, 422 aa, Methanopyrus kandleri
LRVTGLERKILVIVGDGMADRAVPELDGKTPLQAADTPNMDRLAREGSVGLLDPIRPGVRPGSDTAHLTLLGYDPFEVYPGRGPLEALGAGVEVRPGDVAFRCNFATAEERNGELVVVDRRAGRINEDEGTPKLAETINEEVDLPVEFEFKEAVGHRAVLVLRGGDLSADVTDADPKRVGKPVKDVKPTSDDPAAARTAEIVNEFVRKAYEVLKDHPVNRERERQGKPPANVILPRGAGQLEEVEPFSDRYGMSGAVVAGASLIKGIGRMLGMDVPEDEAITGRKDTDLKRKAELALEALDDHDLVLVNFNAVDEAGHDGDARGKVEMIERMDRELVGTLLEGIDPEETVVCLTADHSTPVAVGDHTADPVPVAIWTADARRDPVEEYDEISAARGCLGRFSGLHLLNVLRDLADRIEKFGA

SEQ ID NO: 1193 - protein, 180 aa, Methanopyrus kandleri
MSITETLVAYFMDFERAMGLPGMLVITALECSVLPVPPEPFVFPFAMRMDPWVLATLVTLSSIVGSLLGYAIGYFGGRPIAVRLVGEANLMRVESKLTEHRFSAWTAVFLAGLLQFIPFKPFTIGAGLVEMDLRLFITAVVTGRFSRFLFLGYVAQSETVRNWISYYLGPKALKMLMSTG

SEQ ID NO: 1194 - protein, 161 aa, Methanopyrus kandleri
MVDVLIVLGSRSDRDVAEKAAKVLDRAGVDYNVRVASAHRTPERIDELIEEYEPDVKVYIAIAGLAAHLPGVIAAKTLKPVIAVPVEAKLCGLDALLSTVQMPPGVPVAVVGVDRGENAALLALQILALEDEDVRSFLEEYREEMKKQVARDDDTIKERFR

SEQ ID NO: 1195 - protein, 199 aa, Methanopyrus kandleri
VTLGERTGRGRSIAERSLERWTEKLGEPENLEDLLTLRLSHATWDPFVSETLMIEPSEEAVTEGLKSAEVVAADVGMVAAGIRRSVERLGLETVIASEVGERIPEDTVTGDGMRKILEDHRNVAVVVGNAPTAAEKVAEYPESIAVAVLFPVGIGAMEAKRAAMDAGIPVVTNVSVRGGTPLAVAAFNALADCVTGNAP

SEQ ID NO: 1196 - protein, 549 aa, Methanopyrus kandleri
LRSGDIKEGVERTPHRALLRACGLTDEEMDRPFVAVVNTYSEVVPGHMHLDKVTEAVKAGIRMAGGVPFEVETIALCDGIAMNTPGMKYSLPSRELVADTIETVIEAHRFDGFVAIVSCDKMVPGALMAAARLDLPAAIVTGGPMEPGCVDGERVDLIDAFEAVGAYEEGEISEEELEELEQRACPGPGSCAGMFTANTMACMTEVLGMSEFNCAATPATEAEKLRVAKLTGMRIVEAIEEGITARDVLTREAFLDAIRVDMALGGSTNTVLHLLAIAREADVELSLDDFDELSRETPHLCAMRPGGPYTMRDLYEAGGVPAVMKELADDLHLDRIDFAGRSMRERVERTEVKDREVIRPKEDPVHEEGGIVVLYGNLAPKGAVIKTAALSEEMYEHEGPAVVFDSEEEATEAILGGDIDPGDVVVIRYEGPAGGPGMREMLTPTAALCGMGLDDSVALVTDGRFSGGTRGPCVGHVSPEAYRGGPIAVVEEGDTIRLDVRERRLEVDVEDEELEARLEEWEPPEDEVTGYLRRYRELVRGADEGAVLR

SEQ ID NO: 1197 - protein, 202 aa, Methanopyrus kandleri
LGLEALDPYGVLKGVIELFVVVDPIGNVPALLAVTSELRPRDRVRVVHRAVAFAAVLILGFAVAGKATLDYLGISVEALMIAGGILLLRAAFGMVEGDPTGFRIEPGSHIDVAYVPLGTPLLAGPGAIVTVIVMLHRHGRLETILACLIVMLLTLVTFRAAERLARFLGRSGIRVLTRVMGVLLAAIGVQMVLDGVSAFVRG

SEQ ID NO: 1198 - protein, 388 aa, Methanopyrus kandleri
VPANLPPEYHELEEKYRKARSPEEKLRITEEMLAVVPKHKGTENLRALLKRRLAKLREEVEKRRQQKSGGGPDYNVKKEGAAQVALVGPPNAGKSALLRELTNADPDVASYPYTTKEPVPGMMEYKDVQIQLVEIPPIYEGFTRGDGSKFVGVIRNADALCLVVDLTEDPVEQLETVLRELESAAIKLNQDPPSITIEERVTGGIEIRGEDRLDCDPNDVKDLLRDAGIHSAVVVIEEDGITLEDIADALDKRIEYKPALLVANKGDAPGSKESYERLVERVEDLEFDLPVVPVSAEKGINLDEFKRRLYDTLGIIRVYTKKPGGKPQKPPIVLPKGATVEDVAREIHSDLAKNLKYARVWGKSVKKDGMMVGRDHVLEDGDVVELHG

SEQ ID NO: 1199 - protein, 231 aa, Methanopyrus kandleri
VRTLRVAACVLAAGRSTRFREALEERGEEPVSKLVYPVAGKPMVAWVVERASRVVDELLVGLGYDAGLVWDVVRQHATVPARPVLNDPVDVPMARTAANLLRRSDADVSLILAGDQPTVTAETMRRLAETAAEHGASVLDRGAPNEEVSGDDLLGHGPPLALRKDVVPEFLETIEELAADVRGPNALNLNPVLRECGLAFRVVPPRDDAELLNVNTPDELPEVERALLRSD

SEQ ID NO: 1200 - protein, 66 aa, Methanopyrus kandleri
MIDGLGTSELLLILAVILLLFGPKKLPELARAIGEAVGEYRRAQRRVEWELEAEERRKEKEKRDED

SEQ ID NO: 1201 - protein, 205 aa, Methanopyrus kandleri
LDSWSEKLDVDVWELLKPCARNRNIARILEALLLTRLALHWIDDLPTTGTTYKDPSRRSGCSGTGVIEAPRGTLVHRVSVGSDGKVFNYEIITSTNLNHAPIEESMVGERVYVDEKLAAAKRQLSESERFLLGDACRAARSFNPCNSCAPHAIVKVVKKGWTNSGAPTEVPRGGTEEESAEVISGRGAHVERGVPLRRDAAPGRP

SEQ ID NO: 1202 - protein, 188 aa, Methanopyrus kandleri
VVDNLYDQFVKYHGDAQALVAVFTGKSVHLATVCVGGYAGDVEKLSGLYSTVRTRPESMRSFLESVIPTLWKYLSMHLPDDVGDRPAHMISSGTPFYSGLASGYVHSYLAASGGVLIADTKDPGSVERARLVPFYPERVGKITLARGSNLDERCYSYSEVGYYEWNGTKYACEAGPLTRFSGSLQGRG

SEQ ID NO: 1203 - protein, 86 aa, Methanopyrus kandleri
VCSVSLDGLLETPIDRRTFLKLAFTGVLSVLVSEEPVRALIRSVPRSVVLVFGGSCGGCTTTLAEIGIDLKASPTWIPRSGLSGAH

SEQ ID NO: 1204 - protein, 144 aa, Methanopyrus kandleri
MEGLLTIVRRLRARRVVEVGHGRNLRYLKGLLKAGIDAWGVEIDVQHVRRALEEEVPSVNVDAVEKSRWVRRVLRPDLVYAVRPPVELAVGLIERYPTVALRMREEERHELPEPSIQIGDWDLHTVLDLHTFEEDRTVKPQISG

SEQ ID NO: 1205 - protein, 168 aa, Methanopyrus kandleri
VRWSGRAHVFGDDVDTDQIIPGRCLRRVSYDELGRYAMTGADPEFPEKVREGDVIVAGKNFGCGSSREQAVMALQQAGVACVVARSFARIFYRNAINRGLPTVEAEEDPTEVVEDGNRVTVDLDELVLRAGSEEVPLREPPEFALQAWREGGLLELVKKNPDKPPWRD

SEQ ID NO: 1206 - protein, 157 aa, Methanopyrus kandleri
LSERLNRFAYKFLDITVHIVMISILAITLFIFGVGVYDIVSTFLTSPYQVRFRMTFGLIVECVFDVLLLLEVYQSVLETLRHRRVPLRYVVDITIIMILRETFLKYYRGTIRPMEMLSVTAMLTVLIASRVVVLKYSPDYFKTHLERIRGQEREVER

SEQ ID NO: 1207 - protein, 402 aa, Methanopyrus kandleri
VPSVAERILSEKVGEPVEAGETVYVEPDVIMLHDGSGATALRTLRELGVERVESPEKVVLIFDHSVPPSSVEAANRQNELLEFARRHRIEHVHVDEGVCHQVLVEEGYAGPGRVVFGGDSHTPTSGAASALAFGFGGTDMAFALLYGELWIRVPRTVRVHVEGELEEPATAKDLALTVVGELGAGYADYAVLEYTGLPERMSLGDRMCLCNLATEAGAKSAYVPPKEGPEELRPGDADEVIELDASEVEPVVSVPHRVDDVRPVGDVQGVEVTRVFVGSCTNGRYRDVRVFTEILEELDGPHPDVRIVVVPASRRVLERMTEAGLTLKLIRMGVMIAPPGCGPCLGEHLGVLGDDDVCVSTANRNFPGRMGSRRAEIYLASPVTAAVAAAEGELVDPQDVLG

SEQ ID NO: 1208 - protein, 397 aa, Methanopyrus kandleri
VQSPYVREAVREMDLPDEVIVYDTTLRDGEQTPGVSFTPEQKLEIAHLLDELGVQQIEAGFPVVSEGERDAVRRIAHEGLNADILCLARTLRGDVDAALDCDVDGVITFIATSELHLKHKLRMSREEVLERIADTVEYAKDHGLWVAFSAEDGTRTEFEFLERVYRTAEECGADRVHATDTVGVMIPAAMRLFVAKIREVVDLPIGVHCHDDFGMAVANSLAAVEAGAQAISTTVNGIGERAGNAALEEVIMALKELYGIDPGFNTEVLAELSRKVSEYSGIDVPPNKAVVGENAFRHESGIHVAAVLEEPRTYEPIDPKEVGMNRKIVLGKHTGRKAVVAKLEELGVEPEEEIVEEVLKRIKALGDRRVRVTDSKLEEIVRNVLESRGDRDDPGSR

SEQ ID NO: 1209 - protein, 117 aa, Methanopyrus kandleri
MVGEGVRLVRKIEEPVKLKVYLLEGDKVDGVPAVDWILERVRELGLRGATVHRCFAGCGRRGRSEARILRTSMNLPVVVEVVDSREKVERLLELLKERLGVGVVTLERLEVAYDLEG

SEQ ID NO: 1210 - protein, 131 aa, Methanopyrus kandleri
VVKIGARELAAVAIGGALGAVCRYLLSGLVPQVRGFPMGTVLVNVLGSFVLGFLTWSTMLGLRLSPEVRALATVGFCGGLTTLSTMAYETVELLKASPVLSILYLTANVVLGIAAVLGGMAAAHVVWSGRA

SEQ ID NO: 1211 - protein, 269 aa, Methanopyrus kandleri
VREIELWTAVLAGVVQGITEWLPISSEGQATMTMMKVLGIPPSTAMDLALWLHAGTLLAVLLRFGVPYWLTVRDLLMGGPWRRLGLFAIVATVCTAVVGLPVYKVLKGIFSAATGDAVQMAIGGALIVTGLLLRISPEGLRDRREVNVVDAVIVGLGQGFSVIPGISRSGTTMALLLWRRFDGGEAVWLSFYLAGPAMLGATALELKEGLSAATKMGTSWMVTAIGVSFVVSLICMEVLLRVARRLDFSKVCLLLGGIALLVPLAAKML

SEQ ID NO: 1212 - protein, 90 aa, Methanopyrus kandleri
LTRAVVTVIGADRPGIVAGISSVLAEHNANIEDISQTVLRDLFAMVMLVDLSEADVSVGKLREELQKAGEELGVDVIVQHEDVYRAMHRV

SEQ ID NO: 1213 - protein, 450 aa, Methanopyrus kandleri
MSSLDVEEVIETIEMIRMRNLDVRAVTLGINLLDRAHPDPEELARDVREKIVEVAGDLVEVVEEVEDELGVPIVNKRIAVTPCSIVAASAVRKEGREAVLTLAEALDEAAEEVGVDYLGGYTALVYDGFTEADEAVLDTIPEAIEGTERLCASVVVADERYGINMDAVYRTAEAVKETAERTDGHGCARLVALTNAPENTPFMAGAFHGVGQPEACVNVGISGPGVVRAVVEELKDVDFRTLHDEIKRTAFKITRVGELVGRRVAERLGVEFGAVDLSLAPTPEEGDSVAEILEGIGLESCGCPGSTAALHLLMDAVKKGGAAATSRHGGYSEAFIPVSEDAGMARAAEEALTLEKLEAMTAVCSVGIDMVVVPGDTPVETIAGIIADEAAIGVVTGKPTAVRIIPAPGKEPGDEFEMGGLLGRAPVMDVSDYRPTMFRRDGRIPPKFPR

SEQ ID NO: 1214 - protein, 335 aa, Methanopyrus kandleri
VNASPTVVVIPGDGIGPEVIDAALKVVRAVLGDELEIVEEQAGYSLWKKRGVTIEDETIERCREADAMLFGACTTPEDPEAKSPIVTLRKELGLYANVRPARSWPVPRPVDTEFDLVIVRENTEGLYTGCECEIHDGVTVALRKISEEGTRRVAEVACDLAEERSGRVTIVHKANVLKLTCGTFKRVAAETVERRGLEWDDEYVDAAAYKLVREPDSFDVILTSNLFGDILSDLAAGLMGSLGLAPSANLGDDAALFEPVHGSAPDIAGKGIANPVAAILSAAMMLDHLGYGEEARIIERAVEEVLREGVRTPDLGGSATTEEVAEAIAERVATG

SEQ ID NO: 1215 - protein, 107 aa, Methanopyrus kandleri
LPITPRNIVRHELIGLECRVVKSLGPPYEGLEGRIVDETKNTLVLKTESGEKVIVKDQVLLELKLPSGERVRVDGALLVGRPEERLSKRIKYAEVVRGRFDPEDYLD

SEQ ID NO: 1216 - protein, 118 aa, Methanopyrus kandleri
LTGEYRMAKDIGLGVKPPRRECDDPNCPFHGNLRVRGMILEGVVVSDRMDKTVIVEREYYRYDRKYERWERRRSRIPAHNPPCIDAQEGDKVRIAECRPLSKTKSFVVIEVLERAQER

SEQ ID NO: 1217 - protein, 133 aa, Methanopyrus kandleri
VKAIKAKSPHAALPVGARLVCADNTGARELQIIAVKGYKGVRRRLPNAGIGDMVVCSVKEGTPDMRKEVVNAVIVRQRKEYRRPDGTRVKFEDNAAVIVTPDGAPRGSEIRGPVAKEAAERWPRIGSIASIIV

SEQ ID NO: 1218 - protein, 149 aa, Methanopyrus kandleri
LRWTKSSQPRKQRKAFFNAPLHKRQKLMSATLHPELRKKFNRRSLPVRRGDMVRIMRGDFKGHEGEVVEVDLKRLRIYVEGATIERANGEKVYYPIHPSNVMIIEPNLDDPMRRKIIERSGGTPEVEAVPEKSEEEKEEKEKEEEKSEE

SEQ ID NO: 1219 - protein, 260 aa, Methanopyrus kandleri
LGRARSGPKRHVKRLAAPYAWPIPRKEGGKFAPRPYPGPHTMDTSVPLLILVRDMLGYADYAREARKIITRGEIYVDGVVRKEPKFPVGIMDVVEIPRTGDRYRVVMNEHHRLDVVPISEEEARVKVCRIKNKTYVRGGNLQITMHDGKNWLVEIEDPTDPKEDVYSVGDSLVLELPEPDSGESWKVVDHIPFEEGVWVYAMTGRHSGEVGRVVEIQTFEGPQEDLITVENPEGDQFQTTKGRLIAIGKDEPLVTVRKEE

SEQ ID NO: 1220 - protein, 186 aa, Methanopyrus kandleri
LSVVDEETRRKILEDWESNPMRKPRVGKVTVNIGVGESGDRLQKAYELLQELTGQKPVYTRAKQTNPSFGIRRGQPIGVKVDLRREQAIEFLDWTLDAVDRELHESQFDEFGNVCFGLEEHIALEGVEYDPEIGIFGMDIAVTLERPGFRVMRRRRCRRPVPRRHRLTKEEGIVFMEEEFDVEVLP

SEQ ID NO: 1221 - protein, 48 aa, Methanopyrus kandleri
MARREFGKGARRCRRCGDTHGVIQKYGIMLCRQCFREVAEKMGFKKYN

SEQ ID NO: 1222 - protein, 204 aa, Methanopyrus kandleri
VAEAKFEPAKDAIPGVIVMEERVKIKDDVEIEISQREDRRYEVTVKGPKGEVTKEFYYPDVYLWVEDDEVVIAATRSNRRQKAILGMIKAYIENMQKGVTEGHEYKLKLVYSHFPPEVKVDQKEGKVYIENFMGENVPRVAEIVDPENTEVIVQGQDIIVRGIDKEAVGQTAANLEQATYIKDRDPRVFQDGIYIVEKDGKKIV

SEQ ID NO: 1223 - protein, 131 aa, Methanopyrus kandleri
LVRNPNLSKEEERLLKLREELKRKKPKFRRQEWHRYKKLGEKWRRPKGRHSKMRRKLKSKPKMPNPGYGSPKKVRGLHPSGYEEVLVYNPKDLEKIDPKRQAARIASRVGRRKRQEILEKAEELGIVVLNA

SEQ ID NO: 1224 - protein, 345 aa, Methanopyrus kandleri
LSEMTYKDAGVDIDKEAFAVRAIRDVLEKYKVEPEGCREVEGIGHYAAVLEVHGELLTLNVDGVGSKVLVAQLVGRYDTVGIDAIAMNANDAVCLGARPLAFLDYLAMEDPDPDVCAEIAEGLGKGAREAGAPIVGGELATLPEVIRGKEEGRGFDLVVACLGRVEGDPITGEDVEPGDAIVGLRSSGIHSNGLTLARKVLLSEYDVHDELPHGRTVAEELLEPTRIYVRPVMEVLRDYEVRGIAHITGGGVENLKRLRDDVRYVLDDPFEPHPVFEIIRELGNVPVEEMYRTFNMGMGMALIVPEEEAEDVVDTVSKHVEAKIVGHVEEGRGVVVHMDGHEVKL

SEQ ID NO: 1225 - protein, 652 aa, Methanopyrus kandleri
LSERRGGEKTLEEVKKKVMERVEEVLPSDVVVTDVDFEGPEVVLYTNSPHSFVKDDSDLVTRLAKALRKRVKIRPNPAALSPAKEAKKVILKIIPEEAGVSERDLLFLDTGEVVIFSKKPGLVIGKRGKNVHRISRDTGWVPRIYRQPPIPSKTVNTTRRLILSDDSRRKFLRNVSARIFCGRTRSRGTESRWARVSALGGFQEVGRSSLFLHTEESRVLLDCGVNVAANGTDAYPHFNVPEFRMDDLDAIVITHAHLDHCGFLPYFYRHKVIESRVPVYCTPPTRDLMYLLLTDYIKVLEKRGQEPPYTEKDVKKVIKRTITIDYREPTDITPDMSITFYNAGHILGSASVHVFLQDKGHNFVYTGDINPTPSRLLEGADNRFKRVDSMVVEATYGDSRHGSRRKEENRFRKIVRDTLKKGGKVLIPSFAVGRAQEVMLVLEDMHRKDELEGPVYLDGMIYEATAIHTAYPEYLNRRLQHRILHEDDDPFTSEVFEPVEGSDHRQAIMEDDEPAVILSTSGMLEGGPILEYLRELSDDPKNTLIFVGYQAEGTLGRQIQEGAKEVPLPTPTGKTETLRIELRVETVSGFSGHGDKIELTKYVRSIRPSPPSKVFTNHGEPRACKYFSNHLRRTVRKVFSMAPENLECFRLT

SEQ ID NO: 1226 - protein, 210 aa, Methanopyrus kandleri
MKELDQLTKGTTTVGILADKGVVLAADRRAVMGNLIAGKQVKKIFRIHDYIGVTTAGSVADAQKIVDLMRAEARLYELRHNRMISARALANMISHVLHSSLKAFRPYLVQLIVGGFNDDDPALYNLDPSGSIIEEDYTATGSGSPTAYGVLEAEYEEGMSLDDAIEVAVRAVKSALERDTGTGEGVTVVTITREEGYRELPEEEVEKLLS

SEQ ID NO: 1227 - protein, 485 aa, Methanopyrus kandleri
LHAFLGNAQLPSTPRGDRLEFSEWYAEVLRSAEIMDVRYPVKGMYVWLPYGFEIRQRVVEKLRRKLRETGHEEVLFPTLIPETQLKKESEHIAGFEDEVYWVTHGGLKELDEKLALRPTSETAIYPMFALWIRSHADLPLKIFQIVNTFRYETKHTRPLIRMREITTFKEAHTAHATEEEAEEQVKEAVEIYSSFFDELGIPYIASVRPEWDKFPGAEYTVAFDTLMPDGRTLQIGTVHMLGQNFARTFEVTYETEEGDQEYVYMTCYGISDRVVASMIAIHGDERGLVLPPDVAPYQVVMVPILKKGVRRKILERAAEVEEMLREEGVRVKVDDRDMSPGRKFHYWELKGVPLRIELGARELEEGTAVVFRRDELERETYAFEELPDVVPELLEDIAMELRKRAREKFEKGIFRTDSPEEARRLVGEGIVETGWCGSERCGVRMEEEFGGDVLGTPYPEEDTEFERCPICGETAEYTVRIAKTY

SEQ ID NO: 1228 - protein, 353 aa, Methanopyrus kandleri
LSVPKKRMQLPREVVVGSNVLPEVPKLLRSVGVPDGVVAVFSGRTTMKIAGNEVADHLEEAGYQTSPVIVKGSTGDDVKKALEALDEIDADVVAAVGGGKVIDVAKVASYRRGIPFISVPTSASHDGIASPFASIRREGRPYSEPAQAPLAILADIEVIREAPERLIRAGVGDVVSNVTAVKDWRLAHRLRNEPYSEYASSLSLMAARIVMKNAKPIGKLLPEGIKKLVQALISGGVAMSIAGSSRPCSGSEHLFSHALDVIAERPALHGEQCGVGTIIMEYLHGGNWREIRETLETAGAPTTAEDLGVSDEEIIEALCRAHKIRPDRYTILGDKGLTREAAERAAEETGVIQ

SEQ ID NO: 1229 - protein, 219 aa, Methanopyrus kandleri
VAVEKGDFVKIHYTGRVKDTDEVIDTTRKEVAEEHDLNVESGPVVVVVGAGMVWEPVEEALVGAEPGDELEVEVPPEKAFGERDPSLVRTYRESEFRGSVKPGDTVVSPDGRRGRVLSVDGGRVRVDFNHPLAGKALVYEVEVVDVLEDTVERAEGLLETMVPSVDAELELDGNTLRVRVEGDDAANPAWARAKQRFAKLMIEYDDAVEEVVFEERFTE

SEQ ID NO: 1230 - protein, 316 aa, Methanopyrus kandleri
VPDVRGWPGVRGGVSPEEVFKPTGYHAGPDTPRIVIIENKVVNVQGAEGLELNAEEEDDTVVAELVVKEGYEFDEPIHMCVGVPWPEGVQRIVTRLIVEPEAKIQLMSHCSFPRARDVVHEMEAEFEIGEGADVKVTDVHYHGEGGVRLKAKYDVSVKPEASFVTEFRLTEGRVGELEWEMGARVEERATMEGVARLRAVGEDRVRAVESVRLTGEDARTLLDFKAAAIDGAFVELVGEISGEADGARGHVECSEIIKGGGKVVSVPKLRVVHPGARLTHEAALGTVEKKEVETLMSRGLSEEEAVELLVNAMLRG

SEQ ID NO: 1231 - protein, 237 aa, Methanopyrus kandleri
LALLEVKDLRVESEDGTEIVRGASLTVDEGEIVDLIGPNGSGKSTLAKTIVGCSGYEVVEGEVRFKGRDITDLPMYERARMGLTMSWQEPARFEGLTVGEYLSVCTDDEDWARRCLRIVGLDPEEYWDRECGENLSGGERKRVELAAVMAMRPDLVILDEPDAGLDMSSMEDLAKVIETMREEGSAVLLITHNRDLAEQVGDRAYLMMDGKIVDEGDPKDVVLKCLMCGGGLVCGAE

SEQ ID NO: 1232 - protein, 344 aa, Methanopyrus kandleri
MPEIEVYEIEPERKLLELLREAPSVTEAPAWDAVYPYHRHEEGLFREVVRAVREVLYETEAARVCVGLEGMDSTLCAAAAARACEEYGVELVCYTVGFYPGMPRELVHARAYLVASELDSRYETPVYLYHLDVPPPVESKRELCRLCGRLRFEVAAQAFPGSVILGGANFGEAPHRARLDAITHHGQAIEYRPLLELGFDKGHVVAALREVNFHFPRLEWWKNESGCGVRDYLRDPDPEGVLEAAEANDTFHRILLEEGAWCGHHYDTAVVLYDGERVYPVLIPLPWGWGRDAQRAAEAAFDELADRWEVGNPEEVQEVDDPPLESILKRARQLGTVQPSTSPR

SEQ ID NO: 1233 - protein, 258 aa, Methanopyrus kandleri
LLRRGKSAEEIAASILRKEGFEVVARNYRVELEDELVAEIDIVAEKDGERYAVEVKAGTVGVDAVRQAYVAAKLTGYRPLVMGRRVHPSAEALADHLGVEVREFSEFVEVEPVDELAAVVSDLLQDKMLVLLSAASNVSWEDLYAALQGDLRRVTELVRVRDRSQAEELIEALAFLKLMASETVGAVKGVEGDEFLLELDPRVEVPDGTTLVVLNRWGSPAFVLAEPVSVGTHRARMRSWEGKVETGERVVYLGEVEG

SEQ ID NO: 1234 - protein, 478 aa, Methanopyrus kandleri
VTSFRLRPVFGVPGDDVTRPYLRLAEEDELVRTTREDAAVYAAIGAAEVSGEPAAALATCGPGVAVALAGLACALADRVPVLCATGEITERGFQSLVPSMASDGVELTVTDDPEEAARTLARSEPVLYVDPGFDPDGVSAELEGIEPVEPDPEDVERVRGLLEGKRVAILVGRGCYRARCGELVERLCEVLEAPIVETMRGRGVVPEYHPRNAGVVGLRGWANDMVEDADVVLALGARLSGRTRADIDWPTTVAVGFGVEDADEVVECDVRAFVEALLEDPPRTEPWNPEPGEPPEFDLELYRVVKAALKAWIGPATVDSGQITPTALLAARLSSPSELIHSGSFCPMGFAIPAALGASARVPEMALALTGDGGFMVSCQELETAVREDLPIAVLVTRNGELGFTRQVMEEKEGRAAKMGLDADVLSIVESLGAEVEVIEKPDPGEVKKVLRDVEMNGETTVVVVELPREDVPMPGSG

SEQ ID NO: 1235 - protein, 228 aa, Methanopyrus kandleri
LTVYKQRFVLDTTAFTDRGVVDELGDGDLCEAVTRLLDLIGRARMELAISCYIPYPTVYRELKGFLERNGCPELLSRIDTWIVKKTPNRYEVKVPARLFMAYVKDMRERLDRGRKRAEKAIWEAALEAYEIMLREEADVPKERIIREVIGETVRRFRRKYRQTVRHGTLDSAPDLDVLLLAKELDAAVVASDEGIERWARELGLRFMPACSFPDMIEEYLRMSREVEG

SEQ ID NO: 1236 - protein, 232 aa, Methanopyrus kandleri
VREPSRGELEEYREVLEELTGSDLGIADREVTVERIRGPVRADRVFVDGRPVLTVTFDPWTASCVYTLTPHGAREAEEITGERPERRRLVRRDPYGLLDFEPTGTKRDLEKAVTRALEECDVGVLELETATERVNGVELTGLAVYTAREFLYVDVVPPDPAGRPNPVNAVARILHAFGGEETRPWIHPEYRFLGVRRIRDGKVARCRLGRELVEFEARITRAGLVLRPARGD

SEQ ID NO: 1237 - protein, 259 aa, Methanopyrus kandleri
LDPELKVAVLGGKGGVGKTMLSIALAAELGVPLVDADVTEPDVPAYLELEVEEVLEEIRARYAVKTDDCVECGRCSEVCPWDAVEDPTACDGCGICAIACPEDAIEFEPEVLGEIVRSRNPDLNLEVIHPRSEPWVPELAHVIHRMVPERPCVIDCPAGLGCPVIAALSRADAAVLVTAPSPAARHDFERARTLVERFGLPTVTVLNRADGSSDDLDVVIPESEDVLDAALRRDARALYRALRSHAREIVEELRSEASF

SEQ ID NO: 1238 - protein, 262 aa, Methanopyrus kandleri
MWLAVTGGKGGVGKTTVAVHVHRILGWDALDLDVTTPNLHLYLDCEEVERSDVYIPCPKLEDEDACDLCGTCARVCAPGALVVGRSWDLDPDLCHGCGLCIESCPNGALAYDRVRIGEVRRYRVSETGATLTSGSLDVGDRRSRHLVHALLEGADDERDLILDTPAGAGKDVYDVLKAADAAIAVTQPTPAAYHDLRRLMRVADRAGIEVVILINRSDLSDSWRRRIEEEVRDPVVEAPTVDDPPRSEVFREAVERCLEEVV

SEQ ID NO: 1239 - protein, 109 aa, Methanopyrus kandleri
LRVAVMVEGDGVSSRFARAPEIRVYEVQDDDVELVESTSNPVANLPRGAGRQILTVLTELNVEATVAARYGPNALQGLKAQGIKAYVAEPGTDPEEAALKAARGELPEE

SEQ ID NO: 1240 - protein, 79 aa, Methanopyrus kandleri
LIRRDVKVFRCSRCGEIIEVPYGAPKPSSCPNCGAPAVFIHRLNPGPGTWGSYAGLGRGMGRGGPGRGGRGGPGRGGPR

SEQ ID NO: 1241 - protein, 60 aa, Methanopyrus kandleri
VFVHDASECEGCGECMRACPTGALLVSVGYVEVDASKCRACGSCARVCPTGALRMEPKRG

SEQ ID NO: 1242 - protein, 136 aa, Methanopyrus kandleri
MASRRYRYIGPCRCGLGPHAFYEDTETGEIKHAWQVLGEEGAPAPAWPGGWWRGGWRGGPGWGGGWWWLATADEETRKEVLKAIRETFGEDLAEAVEKLAESVSEGPEGGKTEELEELRKKLEELEKRLREMEEKE

SEQ ID NO: 1243 - protein, 122 aa, Methanopyrus kandleri
VPTVRDAMTEDVVVVGPDEPLERVLRTFASESIHGVPVVEGGRLIGIVTSVDVVRALASGEWRELTAGDVTRKAVTVDPDEDLETALDLMAAVGEDRAVVVEDGEIVGVVTVLDAIRVLLGE

SEQ ID NO: 1244 - protein, 446 aa, Methanopyrus kandleri
LKRLFYPEAVAVVGASRDPSKVGHGIFRNLLRDFDGPVYPVNPHADELLGRRCYPSLLELPERVDLAVIAVPARVVPEVVREAGEAGVPYCVVISAGFSEAGNEDLERELVRTARKVGVRLVGPNCLGIINARIGLNASFAAESPPPGNIAFVTQSGALATSVIDWFSSGDVGTVGVGFSKFVSLGNAADLDFPDFLEYLAEDDDTDVVVLYLEGVKDGPRFLDALSECAGRKPVIVLKGGRTEAGAEAVGTHTGSLAGSGEVYEGLVEGEGGIFVGGFEEAFDAAKLLAKAGPPTSDRVLIVTNAGGGGILATDALHELGFELPEPAGDPSVLPPEAATGNPVDVLGDADAERYRVALEEFADPDRYGAVMVILTPQSVTEPVKTARAVVEFVEEFPGPVIGVWMGRHSVALGIRVLEEGGVPTFPSPERAARALYHAARWAEVL

SEQ ID NO: 1245 - protein, 79 aa, Methanopyrus kandleri
VGGAVKTLLEVPEGRTVRVVDVAAGKGAAAMLYELGIRPGARVEVVKSGPGPVIVRVGGAKYSLGRGLAAKVIVEEEQG

SEQ ID NO: 1246 - protein, 650 aa, Methanopyrus kandleri
MRTVALAGPPNVGKTTIMSRVCRANLEVGNWPGVTVERKTCTYEFRGDRYRLIDLPGTYSLTAFSEDQRVARDYLLGRTDGKPDAVVVVGDALNVAGAVRVFLEIAELGYHHVILAVNMLDEAERAGIGIDLKRLERELGVPVVGISAKRGYGIEHLKRAIADVVQGRVEPNPRSPRYPREVERAVKELAPEVGERLPEYPPRWAVLKLLEGDPELLRELEKRDPELLKRVKEVKKRIAERTSHDPAVLISQARDELATRIARNCVTGRPSLSRQDRIDRVLTHPVWGTLIALGVLGTVFASAFLLGDPLSELVEGAFEHLAGFARSLPAPWSDLLAEGVIPGVGTVLAMYPYVFVMLLLLTVLEDAGYTARLAALASGLLARFGLHGKTVFPAVLSLSCNVPAITASRIIEDERARLLTAIVVPLIPCGARLEVITFLTAKLPDPWRVPAAVSIYVVALSLFVATSYILHRLLFGKPEPHRGHVIELPRLRKPHLRTVLTVTWLRSNEFLQKAGTIILAASVLLWVATRYPEPLGTGGSAIELVGKALEPVTVALLGLDWKGAVALLNGIVAKEIVISTLAMLHAHLTPENAYVLTLVSALYIPCAATIGAVYSETGSMRYAALSVAANLSLATLVGAAVHHALVALGG

SEQ ID NO: 1247 - protein, 125 aa, Methanopyrus kandleri
MPGLEEHLERWFKNESEAVTVYRTLAGLAEEAGMSEVAETFRKIADEELRHAAIVARIAGKLSEDIRAEVERLAEREAQAAELRRNVIEEYGDEMSEDVRAYLISTAHDEERHTKMLRNLLKRLE

SEQ ID NO: 1248 - protein, 177 aa, Methanopyrus kandleri
LRVVLAAVLGLLAVLSPAAAAGTLDVKDVQYPAEVNACQEMEVKFKVVDASTGEPVSDASVIVRIAGEEHKDTPPENWERGHYAKVTSDSEGNVTAKLTAPGKEGTYYVWVKVEKDGYETLVKNLGELKVTGSSTCPNEGEQHRWGEQTGGMADVPVSPLVILGALCVLALAGATRR

SEQ ID NO: 1249 - protein, 346 aa, Methanopyrus kandleri
LKELMSSPRGDPEFPLRAEPLAPVYVPRTQFLKDVDGDGRVDHLHPSEAAALEYLIALGHDLDPFDVERDSRPMELGSLLSPAVEDLRDVGLPVVPSTVRPPDASWAAAILTYLLEEVPIAYGPKRTVLSFSAVYRTPVEHRPMRTAPDVEVDHECVVVQTDSRYVYVHCTRYGVAAVRRDVFDSACGVLATTVDHSPPPEDAGPSEVADHVLTETERPVLAAVDSEHLNPEHATGTVPFVVAVEEGWMEDWKEGVEHDLPADGIGLASYLATLTLRDRLPVYHRDKDGSFKEWLREHEREIIGRARPEEIDPVVEIAQKLEGCLEDLKTPEDDLHRLFDFLRRRR

SEQ ID NO: 1250 - protein, 225 aa, Methanopyrus kandleri
LVGSHAHIPIPHDPVERIRTLRVLREVYRRGRKPSLEVTYRTVNGSTCGPYYVARWRRDSRFKHGRTLYLGKSENESVSFVEWLVSLDRGEVLELARHLMRNLRSVLKTLLTEVSDLPYKKVRRVLARGLALAFDARPAGSPGIRDVLEELPDRLESFVIRTLGGWPAHYSSYLESSVRAGDSSTGGTRYPTWSWNSSAGSCGTAGDASKSVHVLSSTNAHVDIV

SEQ ID NO: 1251 - protein, 1134 aa, Methanopyrus kandleri
VRIPILLVVSLTVAAIGAQALDLYPYEVIRIGTDAIGPPVLHATRDGLSVYYPTKGGTWVGVSLDRDLRVRGVALDAVPVRERDLPTGRGSYYRALEVNGEVLVVDDLGDVVYRDAGRSPNVTRPRWKPLTCVAYVGRDGRIRAVTIGSGGEVTAFDLNVRGEDPVALIDDETALACYRSGGDVYLAVLGTEWSVLERGPECVLLHREGDRWVEVLRWYLPERRHYDHLIEAPHERLVVGRVVELLGREVWTFPLPLSPLIDRSTGRILGWRVGSVPVLESDGEIEVVTGDGRTTVGEGELLSAVDLGWGHLLVLRTPDGRIEFELVEFRLYGPPEVRDLKPEVIRLGDRTLYLATAGVEPVTTILVFDPGTRRLYTLYGKDYRVEGDELEVTDPWGRTLRYVYDPELGPVPPVLVRDGTVLVWNGGGFEEVLTTSGPEDVLPLDDTGILLISRTGSYLVDLGRDRPEVLPVDAVWNDYGSCSHCGVIVAVREGDAVRVITPLGTFELPDAREALWLNDRLVVYEGKDGALHVVTHDGRRALGEAEDAEVVARVGPFVVLRERGTYELLARLTDGLCVGLPLPEVRGHEIVYRVGDRECPIDLEDLLPERQVPDRWYVVEDLALGDLPDAWCRPAGDGTCRVLRDGDEIVVELSTGFGPVRVRTGLTGDPVIAGLNRSLLTVVYRAPDGTAHAALLSPTPIVGRYTDKGLEVVRLGPDGPERVDLLPPAERETLTSLLVVSTVPEYACATRVKVGDRTYYLLSGSLYDAEGRALDHRPGSTPGCAGETVVVPAPIFSSLRRYYPVATVPALLVGSREPPSGDRIELDGVTVLVHREGDVTVLTFVRDGRSVDLVLPPLPRGDWRVERVSGRALRLSTPDGFELELVTDPWPTPTVRVRTGPTRLEVERWDGDGYRPALTLRVSPPEVNVALLSNCDVAAVVGRLVFLSGKVWRDVGTLRSVAVWSSDDSTVLLERVAAFDRFTRERVLATLPGRFVRVVPTELGCDGEPVTLIVTEGTVVALTGSSRVLEPEYLRRLDGGWFLAVFDIDGEYLVVLSDGKKVVDRRLYDSVEPRPDGTLVARTPAGEEVVLRVERTGDGWTLTEGRPDERKGGGRTRRIPVPVPPVPVRRRRSA

SEQ ID NO: 1252 - protein, 50 aa, Methanopyrus kandleri
VSGDYELLHKRRERVQRLRVERHEPAHTDPRRLGGAGLAVRPSILPVTTV

SEQ ID NO: 1253 - protein, 188 aa, Methanopyrus kandleri
LRVMLDTNVVLRAVEELLSPSIPEVTRPVLISEGGRGVRRRLIGLKPSSREQRVESLYTFTFSLLGCLDVTLVVGPRLMKEYEKNLAGESFFNRCWNLRGVLQLLEEKCKWVDPDEELVELCRKAHPKDDPADAEHAAVCLQTKAVLVTLDVSHFSQMAEELRREGLALKWRTPFDFLQELGVFKCRG

SEQ ID NO: 1254 - protein, 322 aa, Methanopyrus kandleri
LDKSSLYGLALDVTTLAVLRLVKRYPASGKGFPEGKNSVELVLGEAKDLFRRFELEVLAGERELLEACFEVLRLPGVPVKVGGACGKAGLETLRKVFTDPDASVLFITSYGLDEFEEVMEELGVDPEEIRAECRRLLVQEVEYEGRVHPSEEVIESWVEAGFEVRVVGREKFEKKGVHFEVCYTDNVMAITSANMTTAGLERLRECSELVVPLVMDVKAPVALLEYEPLGFAAVVGANVHAGVLHEFLTRSDRVYDRRSSYRNFYEEYGGYLPECEGLRHLYRELRAGLEWYLREGCPEMLWWVEPEPQTMPDVTPNLNLYI

SEQ ID NO: 1255 - protein, 305 aa, Methanopyrus kandleri
VGKYVIVFREPAEPIYWRAKWLLAAVKCYRENKECRDYIHKEIGIHKDVKVSQNDIETKILVEAFIKTDENIKQGDINTILVALLNQSLELMAKYIAERLMWLIGIWKKGKEGYYVILNPNDAKKVRRCVYKSHNVIDILDHLKKTLKDIDGIAEKLCDEEYSNNCRLSELADEISKFIKKYCNILEKMEDAYYDKYSDNIEKGELWYSKNDVDKAIEVVEKFDRSIVSLAIDVSAHIPGILTDMKWILSEIRKAGCVPENEIKKKALDKRKVNEKELQEIINFAVENSWIERKDGELKWMKNQI

SEQ ID NO: 1256 - protein, 375 aa, Methanopyrus kandleri
LGIQRLAHNSPYSHHRGVKCSGDGGVLLRPADSWAGVLVDTGSTIVAVDAGPNPWHAEDTDYLLLTHAHLDHVASLDRYSRNGAKVLCPGDVRDDLGLVDSAVGVKKVKSMLYDVIVHPIPVEHTCSAYAYVLDLEECNVLVTGDWHVGPRTIDGEIKPLWKAVREVVGGEGVDVIVSEATRALVDAPELGGNERVFEYALSLHDPRDVLAFLQPTDLEIIDTAFRVASDLGLDVVVDSETDRKLKFLERRGDVEWEYDVADEPLVRSLYLTVSWEKARELAEAGLVEAVVGNWATVHHLRRRVGVKYAYVIPRSGHASRPEITRLITELEPSCLVFRHRSGDATRLERYYSRFVDEVRVWVGRGCRDESLELPP

SEQ ID NO: 1257 - protein, 948 aa, Methanopyrus kandleri
VPTRDRKIDERFPARDVTDEVAREMPITGRPPLQYIHVWWARRPLSASRAAVLTTLVPVDADEDELLEILHVGEDQASWKYTPVTGSHADTSSKGADLRQFIPGDARDEGHGVTLRRMYREATGSERPLVVDPMAGGGSIPFEALRLGCRVVAGELNPVAWLVLKATLEYPVEYGGELLEKMRGFFAEIRKELEQRVGEFYGDNDRAYVWIKWIECPRCGLKVPTRPNWWLLRKRGKPEESLVILPDVPEEGEGNEVGFDVVRYSEAREDGFDPGRGTVSRGAVTCPRCGTTIQREQVHRLSRRHFEDEHGFVRAYLAAIVEGSGRGKEYRAATDRDLEFFERAREELFERWDELVAEDLIPTEEIPEGEKTREPRLRGIDSFYKLFNERQLLVHAELLRVIRELSGGLDDEYREPLTVYAMIAFDKMINYNTICSRWEYTRGVVKGIFDQHAYSWAWDYGEMNVLAEDGGWYWAAPNVLKAFRQISQALSGVDGDVEVILGDARALPQHLRNLGVESVDAIVVDPPYYDNVQYAELADFFYVWLKRLFGHPTFLVTISRSSPESAMEFQRAFSNELTPKDEEIVANRTRHDDPEREYERGLREFLEACREVLPEHGRLTLMFTHKATEAWTSLVRALRDAGFEITEVWPVRTESEHSLHQRWKAAVGTTQIIACRPRSGSEVTTWRRVRDEVRRNVREAFRRAADLVFSDAERLVVARGAALRPYTRYDKVLRSRGDEEVEVSPEEVMEEAYRAVPEAIADQFEETIGETPGFEDLDEAGRFYFLYRFFWGYPKEPSEAPDYEDVLMLAHATDFPLNKYEYRRRPDAKGKLVRVSSTRDRGTVAILDDFESRKPGRVNNQVDALHAVLTALTREGDELDMRTALEVAFEHEELFEPIARALARLREYRLEEVEDEGELDERYPELKYAALVLKKMREVKQRRRLLGG

SEQ ID NO: 1258 - protein, 722 aa, Methanopyrus kandleri
LSGGDLPSVFDVFEPTEHAINRNKNVLSVELSHVEREGTPESDPEKFLALTVPTEGLVNTVVSALKRVAGLEGGEPVQYMTERYGGGKTHVLVTLYHLATSERARELLLERARGYVDERRLEELEEVLSALEGKDVRVVVLDGDSVSEPRWWVELAERVDPELAEEWRSRDMTPSKGDVEELLDRALDGVDGVLLLLDEVTGMLIRSGEEMDRGLEFLKILARVVGKADAPVAMVVSAPKGSGEVQRQLERLKEEGEVESEAVLREEVHDVGEEAVEQLDRVGEERIPVSDVEEAAEIAKVWLLRPREDVDVEEAREAVVEAYEELTSELAGTEGIPRDEAANAVRRLRETYPFHPRLLEVLRSVTREEPYQLTRSYLEILMQVVGYAFDRWKEGEWEAPVFDLGDVFLDETEVEEAVVKPEGWEEPAGDLREKLDDLVEKEGELARRLAYALFVRSLVPDSRKRGATPKDLLLDVARPGEGVELSDVERALEPMEDTLFYLHREGERYYFDRTMNVSSVIQSYMPREERVGWNRAREELERELRSIGGLGRDALVLWEDEEELLNKLREPKPRVVVLPPWEGEERAEELWEKAEMENAPVFLVFQDKGRERRLLNAALRLSAVERALRSDDKLAREHGKELRRKEEEYRNRVRKLLREGYTILRYPSEGGLAREMFSVEEGRSLGSALGEKLEEIGFLEPGEEPGDVRVGGVGGEARGDDA

SEQ ID NO: 1259 - protein, 130 aa, Methanopyrus kandleri
MLEERELEELAKALKRGELDKTGAVLGLLYLAYVETGGHGGMTADDVVRVLQESGYDITKERFYSLASQLMKKGYIESHKINGRRVIYTINSDSEYEVEQKLRERLEKSAPTAERVSAEEMRRILDRHST

SEQ ID NO: 1260 - protein, 303 aa, Methanopyrus kandleri
LAKVSKVFVVGFTARKGGTGKTTCSFNVGFEFARRRKWKGVKSHPVFFVDVDPQAIGKESERAATTLTDLFRIGPFDLTPLKLEGDRMVEARRVTKETVERTGGFELFHVKYSPDPEEFDNADPMCSVHDKVFLAHLSTHISESPGMMDFGKFLNAITGAGFDGIVVLDTPPLNVRTTFVLNALEHCDLVVPVLNPESYDQIPDFIRRHPVRFIVLNQMLKGRTKEAEKIRREIEGYLKRTTLDEDDVIWIPSNDQLRSCTNTGVPARCRNPKPQAVTPKFHHIAWRIEVERERRSKISEIRL

SEQ ID NO: 1261 - protein, 223 aa, Methanopyrus kandleri
VFELAVKAFGLPDSTVTHAKRGLQIMDDRASRGRKPVTRGDYGKVTRGVARLVRHAHTTLVVPGLDVVTKWAKRYGKRPWKIVRNVLEDGGGLLDETPLRFEDLPPGAAPIAAVVRTGNARKVVEEAFLTEYPLFAAMMCAVLEDAARTMLERFSEEEVETYGEFCRKHPGRHGSSFLIGVALWGWLEERTGETIDVDETLRSIEKLARDPVEEAVNGILDVG

SEQ ID NO: 1262 - protein, 542 aa, Methanopyrus kandleri
VDAEHWEVPIVPKPEFREALQRYMISRLEEVGVGPKTVEQIVNLNIEKVEPWNDIKSKITYEIQYNLKHCCCMVEDLKKDLKRIYGELRLEDLCSFGDAALWLLGVRRAVVEFIHDLLLERPDLTKAVDLWLVGRMLDAGELKAATELLELNGYEVPPSPTRVPELKTTERVHRLGHVMTETILTAHALSNRVDSSSFDEAVGKVRNWFKEAQSSLRNEVQKEDSSELVVKFIEGLRDTLEDLIRKTLEHGKPELEEVNSTFELLGIDDLGSFFSRACGEFKRAVDYLVEVVEFDPGRMAKNLLRASPEIELGDRTLEPEVYDPRWSIFERDLSELDRITKEMIEELVTETDRSSSEREAPPTHCPRSWTPSSRRRLTNAEGTLEPSPTPYRSMTPRISPSDPVGKRSPLEPRPNSPTAAHALVGTLDTVLVPTTLRPGSRPSATSHGAVGVEGTPGRRAGGVAVGTTGKLRGRGRRVLDRARVRVLQARGERVARERPRDGHPGARPRPVPGHAAVGRRYHRGGGPAGGRAGRGGPARLRR

SEQ ID NO: 1263 - protein, 243 aa, Methanopyrus kandleri
VHPTRPFHGKFLRVLPEGEGPELSIAFSWNLSRTAADAGSLESVLERREERGETFEEFVGRLREDGWLVGRLRREGGKSRVVLEDVRKFRFPCSGPREVRVRGRVGVLSGTVSVTELVLDDGSREVTLVLDRGLRESFEDVESVVTEVVEGEFRRVVQDGELESDVVRYGIVRAVRDVVEELVERGEAEYEVAVRAEETVNGDEAGVLADEWRFPNAKAALRSLVREILRTRLREVLEELVES

SEQ ID NO: 1264 - protein, 434 aa, Methanopyrus kandleri
VSPGGVPVPERVPLSPTEEFYDRVKSYVERRMSDLGLEPPEDNESLLYDEKYGHFWTFNGFGRELWSDLSAVWILIVLPSNGLLSENIFELEEQPSTGKVLRDEVERVGRGLLERESKRHFSDYFLGELEVFKEASQHVKRFVLDEPNFEVAVNLWIAGAALASQDGTPRIAIQAISSIDTEVSEFPVGVPSYPLGYILQGCGITASVLCLTAHAMVNRGVEEDQLLEYLSDTPYGEKVRIICASWVEGTYKEVIKECLEGLKDGLNRLLRKGRGLNMRDLGIDDPEEFAHEVLRKLADVIANISAVFETVHREPERIVHTLLSVDEEIRLGDKIIPPEEYDPNGTNMYRLEKTFESIDAEKFVEDAMKTVGKLVGGSKGEDVAETATKLATEAVKQGLNIISESGGDRKGRSTLGELIESVVKEVMGDDRKRK

SEQ ID NO: 1265 - protein, 441 aa, Methanopyrus kandleri
VPECVPLSPTDRFYDKVKSYVRHRMSDLGLRIGDAALYDTKYGPLSPLPIFMDGWWRGSWIRERRLWDGKLDKPWLLTVSVLAELFDSNPEEIAGIPSIEIEPGASKLGYMLRKMIKTGEESLKEKREYGHLSDYILWALEVIEVITRRIRDLVLDKPSLETALNFWVIGAVLSSRNVSKVTVISDSVDLEIPKSSVEIPLPYGINIQGSSSITSTLYVIAHAMVHRGIDEDQLLEHFNIQTVCALWIEENMHKKMIKKGLEELKHGFEKLLKKSKWELELEDLGIDDPEAFFHEVSKKLAEIVTNVSTAFETIQDKPEEIARNLLSVDEEIRLGDEVIPPEEYDPKWRQSQRVKQHVKGTLESIDTEKLAEDALKTVGRLVGGSKGEEMAETAAKLATEVVKRGLDMVSESSGNRKERSVLGELIEAVVKEVMDGARKRK

SEQ ID NO: 1266 - protein, 490 aa, Methanopyrus kandleri
MLPALLALAVLLALPGARALDLYPVEVVEVGTDAVGPPVISWDYPFERGPTVTYPSDGGWVRVRLDGSLRAREVVFDAAPPDLRGIAYLALERDGRVIAVDYLNRRVLEDRGAHPTVPTVSRSDSGAVVAYVRDGRLRAVLLGEEASVPLELHLRGEDPFVLVREGTVLVAYRSGGDVHLAVMGTEWSVRVRGSECVLLHREGDRWAEVLRWYTPERLTDADLLDLLKGRAPEERVVCGVPVELGSRTVWVFPLPLAPVVDAGTGAVVGWSHSAGLEPRELIGTVEEDGDVLVFTGWWEGLHASVAPAARLSGSRAIPGSLGLVGCERVMAVAFRDPDGHVRVAVPGGVRVAPTVVVPVETVDLGPGEPLAFLEGLVFYRTPGGDVRCAAVRPEGGPFVRPVVEEVPVRRWEVGGKELLVAGSVVLDPGTGRAYVLPSERSGEPVYRRDLSDGWFVAVFRFDDGFVVVLSDGRSVRESREYRSVTRRRRG

SEQ ID NO: 1267 - protein, 150 aa, Methanopyrus kandleri
VAHWRNSRHERGRTLYLGKSENESVSFIEYLVSLNRAEVLELARHLMRNLRSVLKSLLPQVSSLPYKKARRVLARGLALAFDARPAESPRIRDLLEELPDRLESFFMRTLGGWPAYYFSHLRKVIRSRRGSLDEKHEIPDVKLERWKFRR

SEQ ID NO: 1268 - protein, 317 aa, Methanopyrus kandleri
VDTGAVDDGMIVVVRSDYRTLDSDEPTWSMSYRVVRYDLVTSPRVLPVSGGPSESRSDPRMYPIGAFYDPDRDRLLVITYHPRLVLPGGDETPGVLVSEISGASRDPRFVGCRTLTITTPNDADDVKPVLPEVIDGKPYLVYVEPGEPFEEGGTREYRLVRLDLETGAREVLAEFGERTRVAGEPRTLHRLLGGSVLPRLRARLGRGRAGVRRSSRPSQAARGLDGQVLRVPATVRRRPDGRRVRRPRLDRSEPDRTRSTETRRLDRDRVAVPTTLGRPALPVDRSQVHGDGVDRGLLLGRATVRAGPGVQGDPRRR

SEQ ID NO: 1269 - protein, 527 aa, Methanopyrus kandleri
VIVLNNGTVIIVHLDENLKADAYRLSEFGRLLGHRATGNGVILLYRTRGGSTNVAVVRPSGVTYASKLGESGDLVVYRTADGVVVTVVGNRIAPPRGEVVRVGAEGGVISVLRDGVLLGFDRDGRVIWASKIPDFEKYLDYSWSPADPRKVLLSYRDTSGLVRVISVDSVSGDVKSPKYTVTTLDENTAFVFDDGTAVTVLKNEGWVIRTYDLGGVPIHADKGVIVYRDRFGTLHVAILAEREYLRPALEATGLAVFKREGEFMAVRYDESGRILGLDCEVHRERTDGGAVVLLTGGEVVRLDTSGRVEWVRTLPDFKGYLDYRGTLITYRDTSGRVRAVLATEGGVVEGLKSRETDETVEFTFPDGTSVVIGKDGRIRETHPGGTTRGGVSGRGEQGEQQGNLEGKGNREQGQRQGGPNQGGNQGSSGQSGQNQSNQGQGGQQQGNQQGQQGGEQNQRQGGQPEEHEQGEQGGQHGQRGPEQRGNQNRNQGNRNRQSGGEGGKRGSPVLIPPVIPPRRRVHTQHAL

SEQ ID NO: 1270 - protein, 551 aa, Methanopyrus kandleri
VDVLPLSFECRISQTEWRQNGDEAIVRGTVTVDHLTPPGSPNTVHWVAVTRDWSGAEVVLGEGSTEFPGGLLVPCSVDFTARGPAAILRTGFDVRVSVGYFEHLGGTVGYETAPVILPLTPRVLTVDDVEVTKTVESGGTKELAVTVRFTPPDGSFTLDRVDVIVRDKSGNIVGERTLDSPIPENDSITVDVLLDDDVSRASVEVTLAGRDGQGIRYQVTRYEKFVGDLSVGVLGADLRVENGSLEGAVEVGIYVPTEGTLKVTCDGQPLPISIDGGALSAQPQRLKEGAHRVSLVIPARTHEVSFEFTSPTGRVVKRYEWRIPVGFAEDPVVYQVGFDHGTGEATLYVSSRVDDGVLRIPYDGGVYEEKFEYSRELVVNGQQVAKLRSDAELVRVSVPEDPYGSLDVKLVLELDGVTVERELTVPYTRYSYTVGGYVIDVYPKVDDGFEVDVWRSETTGYAVRVPAGEGSPDVERIGVRPPTEPGTITGDNTRTIPLYGDRVVLVLAPCQDGTSLLAFDREHGDVVALEVDPDRDAVRELRVVYRTELSD

SEQ ID NO: 1271 - protein, 393 aa, Methanopyrus kandleri
VVPAARRAIPTLVSLASLVVVLTVPVSGEEYALRDHGSGLTTVWFYDPNTMGSQLPSNWKDYLWVGKPTSVALGFELTANNCTSYFDSPFAHDIVGRLTAQGFDVTSVDYAEANGPVSSPDDLLNATNRRGTPLTPAGLSLRVTDGTSTYYLIPCYGGPDRVPYYLDEDSWPAKGERTVIWVPTTSGPVPFLLRGADEPNALLVVERPGSERLDLDGDGNPDVDLSGLASLSMVWMLALTIRTVTGDYLLVQGPDLYYEVSPDEHLLNVASFRASDVEFSDDGTMKLKLHIGVEKGTSVSLEGVDLAFLDRDGTALNVTPSEGDLENELLNSLKSALSWDSSEITLSHPSGDIREHLPAIITLRVMGSTELTDNLGNTSQFTVMASGRWTSYH

SEQ ID NO: 1272 - protein, 334 aa, Methanopyrus kandleri
LLLRPLDPWCGVVVDYGDTRVFVDVTDRKGPYVKRADAVIVTHPHRDHYGGVPRTEFGELRADEVTAALLGMEDEAEPLRSSFEAGLLDVRTYPVNHMCPKAHAVLLSGDARVLITGDWCALGEHPPLWELVDDEVDAIVTECTRAASVHPDDPEAAEYRIQRLLELHREDRTVLLLTHVNPLIDVASEVEILHVLEGDPVDEAVKAGAHEGADLEVVSRPEYPLVTSSVGTVEGLSKRPHVLITERWFLYRDREGRLRRLLDAVPYPYIVSGTGHASAAELVRLVEELEPEYLVLRHGSPDGVRALRKRLAGAGLDVRVEAWIGRRGGKLELP

SEQ ID NO: 1273 - protein, 169 aa, Methanopyrus kandleri
MPFALRVGEAFVGEPDEPEIAHIDLVMGSVEGPVGRAFAEALASPSKGHTPLLAVLTPGVAVRPPTLITPTVTIENMAQGEKIFGPVQRGIAEAVVESVEEGIIPRDIVDDVVIIANTFVHPEAEDDRRLYENNKEAMKKAIECAMKGEPTIDELIEKKDEVEHPLAKF

SEQ ID NO: 1274 - protein, 450 aa, Methanopyrus kandleri
VVATVRPVRALPGSSTWVRLSSECIVVRGPDGTVRVRPEDVVSVKEHRSSRPRMDPDEEVRLVLITRDLEHVVLPFRSRKLYRGVKAILAARDGDVDRLLRHLRRVLRKERKPPLFERREDGVWLRWPWLEVRVGPPERARRVVRELLEYWLRLLKESGRDPEDVSPRKVGLSVVLGSLSILFGGGKGKKGAAGAKVKAGAKGDAGGKTGGTALAKASKKLLLKMIKALMKLGVKVTFWTLVAFVVAVALVPLAVMSVVYWLIARRAYRWGSVPWLRGLVLLQLQGFAVLTGFWCLFAPLPVLFGHFLAGPFVVAGAAALVPPSLLLVRAYRREPLRFPVAVHTTGSDVTRPLTLAGVGRAGGGAVRGARLGRPVRRGGRRPLAGARLRRTGPDDPARVEAGPAPVAAPGGRPDRMNGLDRSVGWGTWTEPVTQLARRGDRYFFSPFDSR

SEQ ID NO: 1275 - protein, 245 aa, Methanopyrus kandleri
VFPPCRIMHVVLWSALWSLLWVVILLAVYRRSGRPSNRWISTIAGRRWFQDLRSRVKEVLEAVETAEELVDTTFEGKGAPPELDRRLADVLRVPDREVDWRTGLGIEYLGKSAGDRFALELALELTGSEEAVRELVEDGYDVLPFDVRLEGPTGTVSARGVVVPLGRSDGTPVVAVVGVGRRGTGRIEPVDSELFVFGGLVSSRRTFSSVLRTFGELLPRGHADRRGARHCPRPPGGGGGAREPG

SEQ ID NO: 1276 - protein, 564 aa, Methanopyrus kandleri
VRLHVLLTLGDVSNYRKPKEPWLVEVSLLERLTGESPEDTLEWTVEGRKVEVVETSDRELGTLALLEALHDGFDVEPGEAVVVSTGIIEEDEKREKYEEKVREPLEDLEYGVEEHTDARLTEPEGLVDRVCEVTLELLRTGDAVLFDLTHGARVMPFASALGLVPALRALTFRRAVLGDDEGSLWERVAFSYCISGKEVEGVVEGDRWLVADVTDHVLAWRIRDTVATYLADPSPRWVDEAEEALRTIRSEPVEWVETLREFARVERASSPGPVHEFVREEDVPDRDSLVELVWGTLRRVFLGDVEPREPARRTVSEGPLTPEERRELAARLSEVRDFLRDYCRYMLDRGRVAEAASLMNETHLLLRAFAKLVEPFLNEGAYKRARLKRSDGELRRLKELAAATLDELYFKLFDPFGGLPAARGAIRRILGELGEDVGESTETVWESWSRSGELLRSLVGGGLPLKRDLEERLGDAFRDDPRLRELAELSGTDDPTELALEKPPIRRIRNKLQHGDPVSDRREVHRRLVELCRAHLEGLTLPLIELLTETVEGRTRGDGPARGS

SEQ ID NO: 1277 - protein, 207 aa, Methanopyrus kandleri
LVLPLVTAILLTAAPAAGLQFEAPTAGYPVPEPPHLEDGDGHVEPPFRYAGDHRVRVYPCSVPSTAWVFLEDRRCVIAVKPVGGGHPVLLLDVSDLVVSVGADGVRLRGGYATAVRMEPVDFPSLWIPYEVVTGSGVELLFPWLLGPIVRECSRTEFERVAELIAGERGTPPEDVETGVWDELRPPSPLPVPAVLFVPPARKRRSAR

SEQ ID NO: 1278 - protein, 62 aa, Methanopyrus kandleri
LGIDYTTERVIIHRQRLPEILEDRIIEKYGLDKVQESDHHWRKVSEPALSVTRKLVPRTIDA

SEQ ID NO: 1279 - protein, 206 aa, Methanopyrus kandleri
VGVPPTSWYHVIHVLAILVVLIAISQFLGTLIITRRSRRLRSKAERILEIVEKAEESSDAVFRGEGTAEELDRELSELLKIPDTSVALRFGIAMMNVWETKGREDALDEALRLIDSESLEAFEPYLIPFDVRLRTTHVRMSTWNRIRGLIVPLGWSVQRSKRRGRPIAPERTTRDRPLRGMSLGFGRHRSGRPETPRVRVRWDYRK

SEQ ID NO: 1280 - protein, 325 aa, Methanopyrus kandleri
VPDPTLTLLLVALQHPTHGDCSAVLVRTHGGYAVAYRRDATYRATLHLEVTTWAGRGALREYKLRNGRFCHTVITEDGWVITIGGADDESVNRGLEELGERVVLAGEVTEWDLERALDLLRRIGIGHFLVGSPDGTVGVAVYRYGRTLLEVLRLAEGEYVLVPNDPRYYDRGRFEDYDTDPVRAAAEIAGLDPYGVNRRDVLVYLVEPRDGRATVRVWVAYDGGALLGRRGAGPDPVEFMGCYVPAEWIPRLPDLFELGTVTLGRPMPTRAPEGNSRSAGSPVWWPVPVPAGRPGGSRWRRATDDLHARDPTTEGVRRVGTAVDP

SEQ ID NO: 1281 - protein, 531 aa, Methanopyrus kandleri
LRSSGVLITHLLLFSLTLPIPAHSTPVLHGDTATDCLEALTRLSHEARHLDSYHLVLIGSPPYRYLTVLPNAGLVTDDPSTNASLHGRELGVRTPFGEVRTTLRAPAVILGLVNLEDTDVDPSYVTVLWNDRVAFLTTYSVVFARLESDGRIELERQAWFDKYRDVLPVYRPRADYCEYRFDTRDGTVEVKFYDLWGRTLVTVRANLGDENATFDETTADPETLEEIESKLAHLPERLREYWSFLLVRTPEGVEPVAITIDPLELAPDSHLAEFLRTLNLADRLQLSSPLSLAPALLALTARLYAAVGLSVEIRWGRDDVFERLYDEVWSALPVAACWNLLYPLVSNAILKSIVERLRSFGLPAIVPCCVSVAVWEWVTENAVFPVLERWYWGYTVSMGMAPVVEEPFKRLVAVEFGIPRIVSGAVYGLLEGLWHWVSGIETGPLLSILLDKAATHALLTVLPLPLAMELHSRTFGIIGGTTAFQDSIHLLNGIITGVLTGDVPTILDLLYYTALSVILENTFGIPVTPGL

SEQ ID NO: 1282 - protein, 141 aa, Methanopyrus kandleri
VAPSGSYEEARSLWERAGEALELARFSLEEGMYRWTAFHAEQAVRLGIKAALAFLTGEYPRVRGLSELLGVLVDVTGDRRVRELAGELREELKMLSDAYTAARYRVEFPYDTREDAERFIETAERVLSTLGELLREHGFEV

SEQ ID NO: 1283 - protein, 124 aa, Methanopyrus kandleri
VSRGDVPDWYVKYLRRRYRLFLEYVRRWRYWVRRIAEVIRERVDPRAEVIVFGSVVKGRATGGSDVDVLVVTERARELRPHEVAGIVEEELDLPEDHPFEFHLTTPEGFETRWRRFLDEYERVG

SEQ ID NO: 1284 - protein, 325 aa, Methanopyrus kandleri
VCSARSSRRSSPCPGPRSPTAGPRSPGVHLGEWTELTVTGSTVQAHLIVGIRGYGLEGSFEVPIKVLVPSDAELVTAKWKPKGGGEVEVEPVSVRTVTWPGDTDQIGYLLRYRSEDPLGALFPDGVIRWRELTFVLPVEAKGSESSRCLFDVFKGEYLGTLDVTVTARLHRGKGEEGEAWFFAWPIPESPNPAYDVKVHGLYVDFVTVYDPETGRWRWFIPVIQPKDRSSTYVYVRVDVAGPVFTFGVETDHVSVETVYPWDERASQFLSLTQYLPVLVVMKKELQRGEANGETASPGRGGGGAGSTRTGRTVPLIVPIVPVRRR

SEQ ID NO: 1285 - protein, 192 aa, Methanopyrus kandleri
VERIRALRVLREVYRRGKKPGLEVTYRTVSGNTCGPYYVARWRRDSRFKHGRTLYLGKPENGSVRFVEWLVSLDREEVLELARHLMRNLRSVLKTLLTEVSGLPYKQARRVLARGLALAFDARPSESPRIRDVLEELPDRLESFTVRTLGGWPAHYSSHLKRVIRSRRRSLDGKHEVPDVGLELQRWKLRHG

SEQ ID NO: 1286 - protein, 324 aa, Methanopyrus kandleri
LLPYLVLGLVLALAPASGEPLIQGSLSKDLDYLHEYFQKQVLPKWRDEPHVIADHPARRFCYLPGKDVFVTGAPEVRVEPGSIRMEVQLGRRIIQVARDVQGPAVVVVPGVSYYKVMALAGQYVCEVGEVILAGRPPRFAAVLKRDDQVIAREDLGELFLADVEYWVYSDRVVMRVLGFRPEGGWSRYREGEPLAITVTFDLGGGRILVDRVKVTDAALVERMRELSRSLEGPVLGSVLRTGSGVEPLFVDFEPREGDPLVRFIERVFGMYEQGASEEELREVMSEHPNVEFLFPEKGGGTTSGIPVWVLPLLPVPLAGRRDDA

SEQ ID NO: 1287 - protein, 752 aa, Methanopyrus kandleri
LTARKIDSWFPVAAVSDECERERDLGSPVEVLPGFRSPVALARAVVLLSLAPEDTEEDALLPSLRPIVGEPWRTPIEVPDGDVPRKVWVLGDGSIALEAARMGREVRLVVTDPAVARFLREVFGRLFALREEALEELEEFLHEVGEVLRDRFGDFYGREDRAYLWIKRVRCPGCGLLVPLMEHRWVVEGRYALELDVPEDGDEVEFEVVEAEEAGPGTVRDGRVTCPRCGRSRSVEGVRRDLSLRAARREEEEPVDAYLAVVVREDGSVRPATDRDLERFELAREEFRREEWEVPRGEPPEGLKRWGIWDVSWLFNRRQLLAHVEVAVATSEVDGDRYGIWAAAVLTELSLRNSVLSRWDPVTVGTLRPRGWTWDHGELPVPSAWREVSDEITEACRELVEVAEDVEVEVVKADEVNRSWSIPRDLPDVLFRAWSELVSNVSAGVGEWKVPVSGGGWARTRAPLPVVGGLGWDDRVSLILRGDRIAGRWEEIVGWIVGCGLEAASAWPVIGEDALVVPLVGREPGPEDVDWEGVVEEVRGSVRELLREVRDLRGRGWRSVRLIPYAAALPPCTGVDVVRRDGDSLGVRHPEVLSEVLAVGWRELVEAVLELLDVGLSDPRARFYAVYRSLWGYPRPDDAPGREVGPPLRALGLDPNDLPYLDADGRLKTYRERRESRLRPEEDPVDAFHAALLEVLEDGPGSALEALPEEVRGEVLGLALAVARAARRRGEDHPEAELARRLVGVSAGAAAR

SEQ ID NO: 1288 - protein, 250 aa, Methanopyrus kandleri
VPRRGEPVDTEGRLRETIGRYHGVVLDTNAFAALAKAFVDDICETPVDNVVYAFFLEVKRMMGENFLLYSYEELRAEYAKRLEDLRDYDGQEVCYACPILSELLGPTVRGLCYLFKGHEDVSVHDDVLSRPEYSEQLERLYRGLRRGGYAGLPESLRGFKCNFEEGQVGDKHVDVANVMVAAVKGSVLVTSDRGIRDACSELKPRCLCVYFNPGYVDDPVREEFEFELVPRPGGLPVGLRYRKGIGKFTR

SEQ ID NO: 1289 - protein, 214 aa, Methanopyrus kandleri
LVRSHVHIPIPSDPVERIRVLRVLREVHRRGRKPSLEVTYRTVNGSTCGPYYVARWRRGSRHRHGRTLYLGKPENESVSFVEWLVSLDKKQVLELARHLMRNLRSVLKTLLTEVSSLPYKRARRVLTRGLALTFDARPSESPRIRDLLEELPDRLESFTVRTLGGWPAHYSSYLRKVIRSRRKSLNGRHEVPDVQLELERWKLQHGWRLRPRTV

SEQ ID NO: 1290 - protein, 247 aa, Methanopyrus kandleri
MRRTGPGAGAVGSVPSWEWVRRLGEAARRVLGEDARVVPFGSVAKGRAVPGSDLDVMVVSERAPSSFRERARIAYELCEEAGVPEDRVDVLIVRPKDFEVWGRMLMTSESDDTRALVEELLERGERFLRSAVESEERGWNDLAALHAHQAVELTIKAALIALGEAPPGTHFLGKLLGRLHRVTGKDAFGELSRRYRWELRELSHAWSEVRYGHYPGEDVDVGELVEVAREVVEAVRDYVLRLVDVGD

SEQ ID NO: 1291 - protein, 396 aa, Methanopyrus kandleri
VGTSTLNNLARALGKGDLDADLDPGDAYRAARNPEAVEEIGEEVLEEALMELVEADPKRASAELNTLLRMAERAEREGLEIDSIALIPTKTANCRLCARVVAEYLREEGYAVWETEPVRAGVDPGEFWWGLSDLLERLEDVGVTDPSRNVWVAATPGFKPEAAVLTLVASLFGKPVFYVHEVMNELVEIPPAMPVVTDPGFVLGLIELRRRLGDGAPEEVAEEVLNDLARDEEERERYKLFLVEDPRSKNIGPSPLARLAESFLALGLLAAKARNYSVEIRTKGHTVPVSRGGGVKKVDRATLRELPLEDDTLEVLATVAALEGVDDTWFVAGEWTTEGTRRHARTVEVLETRDDAVVVSVRDRRVHISRLLIPTEDPERVARALKQLVGALSDAR

SEQ ID NO: 1292 - protein, 429 aa, Methanopyrus kandleri
LRTLPIALTLLLVPAAAHALQPEVLWKGEFPDCPGSGFVHLVPVENEENTALLVVRTFERWSLYEVKGSEVTHLGDVDLATPRSTEVTGAMYYPDRNELLVTAVIEEEGEGPGGGVLAIRVGRDGVDARKFDGAYVHARPCPDGTILALLHEGHEYLEDEGVHRHDLALIRLYPDGRAERLVTFDVFSTLPPSALLIPGTLRIEPLGDDYLITGSDLVSMVELRRTASGWDTRYYGPMNLGARITYYLEESTVLDPRKRLVLVRQSNLDEPLEGYWAICELVPESGLGGPVLKELRRVDLGGDDLYFPQSGVKLEVGGSTYYVVPAVGASSTKLLVLGPDTAHVWEVPGFRELAVTPRLYGARVSERETGGCTVEVCAFKPSRGEEWLTPLFGGTGEGEKKEEHKENEGGKVAIVPVLPAIPFRRPGRA

SEQ ID NO: 1293 - protein, 368 aa, Methanopyrus kandleri
VTVVPLVLGLILTATPSAGEPLIRGKASDDIGYLARYFESVVEPKWKSADARIVVDARGFRGRTVDVVYVPGLDAFVVPAGGRPRGSVTSVSDVLPLSYVECEPGKVRIRLDRVGRTVVVEGPAVVVRGLYPPIPLDVSALVDGYRCTVVGGVQLPIDGGCPLAPRPYVPPAAVLEGGGSSDRVVLADGPWPLLDVEYLVGGDVVNMRVQLLEDPLTSALELAIATVSHRKADVAPLQGVEVTFDLGSGKIRTRHVAVPWRPTGDTSEDGVGTLKGGVVMRTADGLEPLLVWFEVARDDPMMEFISDVVEAYRRGDFGEVGRLMKAHPNVVFLFPEGREGFWVYAPQVVPLRRAHRRRIAGTRRRGSP

SEQ ID NO: 1294 - protein, 694 aa, Methanopyrus kandleri
LENRLWALTVTPTRVGTGGRPGAIDLPLIRRRHTRVPYVPGSSVKGALRTHVEAELEKPDDLVDEILRDLGEDTEERRERALRVLFGDRDTKGAVTFGDLLPVAVPAPVALEGGKTTPLVWLTCPYVLDWIGVEAPEPDGEALAPSGFPAERVVLEHRELVVRRNGKVDGVADELVVPGPWKLPLHSRLLILDDATFAGLLDPDRPVVTELRTRVRLGGPWDKTVEEGALWTEEFLPQAHPPRGTVRGRRVHAGSDRGARARGPPEGDLGTARRGRFRRLRRPTVELRGGAGMSERSPENVLLSRLREDVDEELKGDLSTLCSVLLYYGLPGALVLAEREDVREALSRLPLDRIERELEREGLPRADRLATRLADLARNAAAVGELPEDEGRDRVERLRRRVAEAAEESLVPEEGVRTHPYHEKRTLALRALSDGEENLRREVRRLLRRVVDAAEKAARSDEIRGYVGSYLKTLRELGRSPHLRVREVELRFPHSRLVVGMGGPHPAENDLTLDPVTGLPVIPGTTLKGVARAAGELILERGDPDELRKYFGADDTRQARKRFREVFGSKPRESEPKESDDGNASESKRAGEVTFHDALPDPDWLRDVDSPLEVDVLNPHYGEYYEGEGPPHESMRPKPVEFLTVRRGSRWRTVLVSERRGSLDVALRLLKYGVERLGIGARTCAGYGYGEVRY

SEQ ID NO: 1295 - protein, 793 aa, Methanopyrus kandleri
MRYRLRRLAHRPPSSTSSSPTPLLSRTETGEGRRSFPSDGLPPQNSASTRRSPSPSRKEAATARNAHLNCPLSSGGRGSGPSRSYLTCEVIAGVAKVHPTVRVLNRGPGPPPGIALIKLIQGEWRGAGVSRVPKLVTVRLRPSGGIKTWLRGRKLADSLAASWLLGYLVYRVYERLCRRLDVERVLRPVLPGNHPFEKKPDNLEPWETRGCVMPDAVELVVDGDVSAEEVARIARETVEDVLEDVLKRGRETPWRCHNVSLYEPLEDWWERTSGRSAARVELPPGLIQVSAAVVDLEEPDDEEAYREAVRRVASLVGTRAEVMDARGSGGQPCSVCGTYPTVGDREFWEELSERLPPQLLKRWEGGFERLCAACLLKRYFGTHVIRSWYLEKISWIPSTAEVAITPVKVGILNRWEELKDDGGFREAALGFLREVLPEQLRQIAHYLRCVKEVDRAGELEEAAKDLKRDRLEPEGLPEDVRKELHRLTPKAPRLDEELGDVEDSLIEVLLCVEGRFWYDPEAPGGLRELLEAGDLENLYTPYYALLKLDGDRMGELFSRDPETTRGASRATIEFGLKAMRIVHGHYGVLLYCGGDDVFAALPLHTALDCAFELEETFRESLKKWKGTCSAGLAVVHHLHPLRDAIDLAYRLEKRAKEAGRNRLAVGLYRRNAPERVAVLKWEADGKRPWGLLFELADLVSRRAAYHLPRDWWEGWWEELDEPKNLLRSLLGYVALRHRGEGADEGEIVGLVERIAEVVGKAGPEDGDPGAEVGRALEIALELRSECPAGGNGG

SEQ ID NO: 1296 - protein, 444 aa, Methanopyrus kandleri
LTARHVAVGFLVLPQDRAFFRRPEPFRAAAESVAESEGPKPWTVAGCVRNALLEVTDGDLGEVLEYPRKLVRSAPPGSIGEALGETALFLGTWVVEVRPGAPDRLERVWWPCPAHLARYEPESGGEAVDLLRVEEVGDAAIAFSGHDEALRRRYGFMTPKPPRPGSDVETPGRYVDTGTISKILAGRTPARRTPDLEDNVAGPGELLRPELHVGVKLVGLKTADEGYLYAARFLRPGRSPVDGGSLVGFLTVLAVPEDAWDDGVLEDLPSPGGRLGRGRHAWVIPLRAGDWSDDVFPEVEEPEGDLPGLYLETPTPFPEGDVRSSSPGDRLKAEAVLVRPGSPRDRVLQVELEVSEVESEVLADRVIETRRVSTWSGKRASPDHLAAAEGTVLALGKLDVDPGTPLLLFPRMGDEDRELLASRLAFHLSGVGTAYALSLPGVSP

SEQ ID NO: 1297 - protein, 342 aa, Methanopyrus kandleri
VTDALPYFLVCRTPTRAGAGQRATDVIDLPLQREAHTKLPVIYGSTLKGALRHATLRKLSEELDGETSEGLVDAVFGDRPGEGSPSPGVVAFSDAVLLAMPVRCEPGFLAWVTSPYQLGRLYEVLELTGELEDLREAVEEVLNDCKDPRGNGALAPEEGTLLLDRIRVRAEASDAVGDLAGVLSETVFEGAPEPHFRRYVEERLVVLGDGAFADLVNSCTERVVRVRLNEEKTVEQGPWYEERVPEGTVFFGTLNVRHDTVPPKNGVDARKVLFGRWEPDGVPDGDDRKLEALKEAAGELEAGVLGAVADGSGDGYLDLRFQVGGSETVGFGLVRLRQFVGE

SEQ ID NO: 1298 - protein, 156 aa, Methanopyrus kandleri
MPAPVRSVSFGRPSGIEGTQTGGEEGTGEKPEEKEGTEEKPGEEKPANGVGGGTETDRTRETSTKPEGPGKPTGGTEGTGGATESSKNGTEGEPKPSEPEKPDGGTGKGRKNGGESEGAEGVKREPQPREPKGRRLPVWWVLPVPTPAALRRWISA

SEQ ID NO: 1299 - protein, 562 aa, Methanopyrus kandleri
LRPATVVAVVLLAALAPTSALDWTGSQEYGAIGQECRQAVERATIWWFAEGNEHLNAAFDTAYPVLFAAERMDSLASRVPLHVPASSPADTWPAVRIGLLLYPTFRDVNRLLEPILHETVYQGLAPVTDRDVIREKILGLVEAQDDDGSWGRWREEKPEETASAVELLLRVLQFRDVVGGQLGLDDTAFSEVREAVERGMAWLLGHQGSDGGFDQDPADHARVISTLIDVYRLADRLGLDVDRDGILNAVRKGLEWLFSAESGVTWEDVDGSHGPVWTRNGSPDVRTTGDVLRFALLKALWYDIATDVEVDTPGGKRKLRDLIEDPEYDLHATVRWLLKGQVATTGPEYGSWSDDEGTTAAAMGALEAYLNPRVYYDGYWRPADVRAEMELFDVTERGTTLVLRYRVTGEVESLKATFYEDYGYHGCYEVWSGELRSGEGVLTIDVDGHTLYVFRIVARYRDGTVDDVFAVAGLKIPLFAGIESSDTSPVRVKGSTSRALLVSGGLVGEDRDPGGSRRVVPRERTGGGPGGAGGEVRGLLGDLPGGPRGLPGGSAREDRVAR

SEQ ID NO: 1300 - protein, 80 aa, Methanopyrus kandleri
LECAWKVYDRLRNESENKRRMGHYLGIGRRYSRSRVHFQVKRLKNGEFVPVVTAFAGRRKERGNLKGVRKAMGKSWTLYP

SEQ ID NO: 1301 - protein, 350 aa, Methanopyrus kandleri
VRVRWVLLPALLALVLPLPVHGDAWVGPEALLDVGVQSDLIIEDVHLKESDHGVEVVDHVDAEYRAYIRVKEPGKPVTLHVLLPQGTEVLEARFYPELYPIEGIDLDSPDVNVKWERIEPVSRSEVTWKVLGWTWRWTQLDFRVTPKYDERRHGCSALVLKLRIPTAHREPEEIDRLPIAGPKHYPELGSYYYFGCIEWPAPLQPSGRGGGFNCWATSDAWSPHVLFLWPGGFADIQEGFTNVSLTDHLVLTLGGSGGGSGAAVDVVGVREEGERVVQSEWPRVTGRFGFPYVPVVAVIGLEKKEPSSPKTGRKPEREKPAKHELPVPPIVPPPMRGRRRLTGKASNSSP

SEQ ID NO: 1302 - protein, 408 aa, Methanopyrus kandleri
MKVTTRTTRGMEPPVPPRFVSTRTGTARPPYTYRKAYTAGRIRGSAGVEGAPDIGERSTLLALRWLELFSDVWIVILGLTTAIVFFVFGLLPSLLLLFVLLLISAPMTAPVRFVLSTIPLIVVLWSARLADREVIVLSVILLIAALWSARSAGRKVVREASRIVEEAEDIVGVVFRAEGTPDKLDRRLSGLLKVPDRDLSGGKGTQFVVGSRGYIKGCRGALREALKIVGSGDALREFAEEGSLVTFHVTLVIPPTSRYEFKTEHDLRGIAIPLGRRSEDRAPIVALLGVGRRGSAEDWTLAFGGVVPLGETFSELHPHEGRTDDGHGSRRHRDHDGDHNGWCAGGDGLGDYHWWDSDESGGIFESIVDSIAEIAESMEGGWGNGGWFGDGGDWGDGGNGGDGGNGGC

SEQ ID NO: 1303 - protein, 509 aa, Methanopyrus kandleri
MGFLSDAIDKVIRGVRRGRADLKSVVRSALLFTPVWSVITLLALLESMSFNDLPRLSFGLIVGLLSSSPFQVLGSRMVADARYLGVLSPVIGVLALLAVVYPPVPYLLSRLLSESFGLKLSHDVVLAAELTGIVYTLTCMVAASWKEYRWKAVLQIVASWTAFSVAFAVLAAVTSDVLRSFVLSSSLLAITLTASLVANARKHLENPPEITKEYLVGCLVVAAAAALDYFVIALSSIAYYAMMFFDKIVIWCGRGFPYPPLDVPASVGMVPLLAGTFAAGIFWIDVGDDLDRIYRVESRELEEIGRRMFLQFIKGAGIALALSGVLALVTASFVRPRFHYWMSGDVAYLLGPVLKASSALIHAVSAVPVPPFGNLATLVKWIERQLAGANPDLLVLYLLGSVPGALVVYTYPQLITFRREIEATVALSLVPIAELLAWHRWGVKWLALGYLMGTCASATVCALTAVRMWLNLHTEAYRVLSYNNFVSYVIEVQRHGGEEVRPRDPTIRG

SEQ ID NO: 1304 - protein, 491 aa, Methanopyrus kandleri
MLGGPEVTIVTEGTYPIALGGVTTWVQRLIEHSPNVRFNVLCLAPPGKTEPVVDIPENVRDVVVRELVPRRMGKRRWAARVFPVHRIRWLLGRRGEWAPRGFRVLERAFEYILEGEPLEEEMLKRLYEVSENPVKVLEGPTVYTLARYVEDQLGSDERFSDLYWAVSNVCSFVMGAASGVRHMPECDVAHPQNCGVCGFLCAIRKAVKGTPYIITEHGVLIRELDTRLEGLGDVARELYRRCFESMIETSYRYCDEILAISDYHREHAVKQGAPEDRIDVIYSGIETWRFPPPSDVERKFREADRLHVGTVARVEPIKGIDVFVRMAARVAKEMGHDRVRFHVVGPIDDREHYERCREIVERRGLERVVKFHGSQSPEEILRFYHKFHVFVLSSRSEGLPMALLEAMSTGCPVVASEVGAVPYIVKEGIGRTFPAEDHEAGARALLELLQDPEALLRMSYTATREARRFDVTRMCEEYTRRYAKYAVPDPG

SEQ ID NO: 1305 - protein, 97 aa, Methanopyrus kandleri
VTRWRYWAERIAEVARDLLGGRTRVYASVEGDRLRVVIVSGNAPEKPLERAEIVAEIERELGLEESWAHPIEMHVVDPEEYEALWRGVLREAVEVRT

SEQ ID NO: 1306 - protein, 639 aa, Methanopyrus kandleri
MPDCGTSSRVGKSYTVGRVVENLLTAGEASYICFYVAPEPLLDDVERVLRDKLSGSSDVLRLKDLGDYECEIPVSEFLKNFGEDPKLSSLPKCTPEFYEEVYRRADGDPMELGRWGYFERLREYVEGPCTWERCGDCDVVRDHNFMVGARKVKRGVVLLTYRKLGDLPRFVESRERAMREEGEEPHMSVDRLREVLSGSLVVLDDAHHGLVRSLLAEVKEGIVRDSLRESLGGRLVHLSTVWAALDRNPSEDTRGKLRDVVFGDYAEKVREVVESRLEEWIESVKGKGRVRVVRALLELDHAVRTGEEVGIGGWIALATGGGVVFAPEVDSVEKALELMLGEYYGLPGAYVVIANRPVLERPSVRVSVEASGEWRAYLLPLYLRKEKDVGLILEILTRLDLRRHRIAFLDRAETLVDRIIEGLRRLRRDGRLGVEFRRLESCNDLKDVATARRGALGVGTVGVGLVGCEAMGISGFLIARQYLSSYAPDLSVALLLARRCEVRGRAERLMDRYGFSEEDATVAALRLTAFEDVLYEMITVAGRTAQAVPEAFLAVLGAGSIVKTASEHPEEVEEVYRGVKDAFGGWAPRVMVYDPRTDREYDLIEDGSELPEPTYLRELDEAALDNLVMWLDGKLSEVP

SEQ ID NO: 1307 - protein, 207 aa, Methanopyrus kandleri
LVESHAHVPIPSDPVERIRALRVLREVYRRGKKPGFEVTYRTVSGSTCGPYYVARWRRDSKFRHGRTLYLGKPENESVRFTEWLVSLDRSEVLELARHLMRNLRSVLKTLLTEVSSLPYKRARCVLTRGLALAFDARPSNSPRIRDLLEELPDRLESFLVRTLGGWPAHYSSHLNKIIRSRRKSLDGRHEVPDVQLELERWRLRHDR

SEQ ID NO: 1308 - protein, 101 aa, Methanopyrus kandleri
LGVLGGPSPRLRLYVYDFKEPGGEAERRKLRELLESHGAFRLQYSTYALLAEPEVHARVLRRVVARVDFEEGDSLIVVPMCRRCLRVARWVDAEGVRGLRF

SEQ ID NO: 1309 - protein, 711 aa, Methanopyrus kandleri
MPWRSNAVRVRMDFEVLRREDYHDRGAARGAVKDHLREREFAFQVDTVVYSAGDRGERVSWDDLSPTARAYAVRAALRLGLEGLGFELDTGYSLLCDRDFFEVCYGGRFDGERIPGVYALGNWREVRDRVLRTLGREYGPVEVRLGLEVRARALGDGTVLLSVDPRARAISRVRLKDLVRDRGVGWAERVLPGTYVIPTDGGLTGRRLKVVDAVPADEWEGEDGWDLERLREHWSGYGVEVDPEVVVTVKVGGGVLHYPDDVLRWQVPVHPVTEYFRLGVADRVSVGRYLLDRGLGEFRRRFPDVAVEVREHPGSTDTRRVRPPAVVAGGEKRGKRTELNDLLWNYGPYEGAGELDGEAVHLVADRELPGRAGISERDLERLLELVVGRLRRLLGHDVEAGDVRVADAVDLPDLVGDADGPVLVGVLSDDDRTYARVKRRDPLVQCFTERVLSDGKTVKYAATVLAVGIHCKHAGQPYAVRATSGPKDVAVVGVDVSRKVEGGRVVEGRACCSCFVVDEDGLIEHGRTFTVPVGERGETSGRTAEIVLETAREYSDRVVYLRDGTVPGEELEAVREVGRELGLDVTVVEVIKSDPTVYAIEGEGWRAPRGAYVRLDGSTVHLCCSPYTPRRRGDKKPGTPRPIALRRRDDKLDGDLIGLVHDLTASNWGNPSGTWSRLPAPVLYADRASRLARYGVSVGPGDPVSERPWPV

SEQ ID NO: 1310 - protein, 331 aa, Methanopyrus kandleri
MGAPNDTVIFLRRGKIERREDAFRIGKSKYSAVRTTGIIIAGGAQITTQAVRLALRNEVPIVYLGGNRILGVTVPFSERYATLRLKQYEIASQPSARLAFARPLIASSILARAAVLEFLANETGITGLEDAADEVRSEAERALNAGSTDALRGYEGRAACRYFRALAEVLPDWAFSGRRTRRPPRDPFNAAISFGYAGVLLPVLLSRTVAAGLEPFLGFLHGPRGRRPGLILDLMEEWRALAVDVPVLRRFLDGSLSREMFRWKGDAVLLRDLDAVSAPVLTVLSRVRGGLLEAVDRRIREVRDGVSRQSPPEPLEFDPEDVGVVWDALEV

SEQ ID NO: 1311 - protein, 488 aa, Methanopyrus kandleri
MRRAFPSTVLPVALILLPLPGHGAVWVDPEVLPDVSVKSWLIVEDVHWKEETTWHGDKVLDYVDAEYIAAISTRNPGKPVTLHVLLPPDAEVLEARFYPEIEWGEAEEVPPAEEWMYIIWKEWERVEPADGSEVTWEFLDETWKWTQLDFRVTPEAHDSALVLELRIPAVHRVPDLQMVEPVWNGEGISFPYGVKLKYLYDIGAVEWPVPVQPYPAAWCLDCALRTLSVKVELFVWPDGVFTHVPEGAPWTSYEVHVMDHLMLALGDVVTIDVVGIDPRKMSYEEYERKRAEVVRSEWPRVVERFGFPYVPVVMVVEIRQKRVIFDISLTPDPVEAGSEVTVLVRPRLYWWGPWCADEWPWDCWPEEGVLRFELKDERGSVTDLGAVELLPGGYVDGGLVMFRFRAPEEPGDYTLIVRYEGPYGEYRERLSFTVKERGRRDGQGRTPPSNPPESPPEQPPEKPPEKGGKRGFPVLVPPVIPPRCRARV

SEQ ID NO: 1312 - protein, 913 aa, Methanopyrus kandleri
VERVALAGLLHDVGKLPQRSGERGSHQKLGAELLKKAFGGREREDETLGLAVLAARYHHSDSLGDARPSDLEVPEDWGLELAVVALADTLASAERGNNELDREEPRGDHRGYWTLYNPWYRIWEAFRRRLGGEVPGGWGWTEGRPEFVPDELPLLHLNVDPREFEPPKVVEEGEGYRGRYRGLAGRLTEWLKGLGVRDHPHPFDPARVAMEVTTSLVPAQHYIPEGRDHMRSITLYDHSLLTASLASCLWYLVEEGHLDGPEDNPSEAYHRLRDGLREGRGSFLLVRGSLSGIGEFIRSVRRASPLEERRRTASYLKIIRGRSAFVDLLTAGAAWTVLRETLGRDAHPAFLLRAAGGSFTLLLPNTEEVREALEAVREGLKRSVSEGSDGVLSLGLAWVELDWDALMRRERFRERVEELGRRESEDRRRAVLPGRGTTSRVEEPCPVCGSPVPEDEGCEHCERLGDLGDSLVRRDEEDRPVFAGFLVYEDRDGSGDGGDVVHERDGHRYRVHHVTREGLGGAVSVGGLLLVDPAHVEEALKCARKAAKEGKSPARVVMSYFPWYAATKDDVPESEGEEGIATFSGMAERSPGASLLGFAYVDVDNLGEWVREAAGDAFGVLLSISRFTDLVFRHWVNALGFRTVAELLDDVPGLEVRLADGGRELDPPELLPRFGEDGEPEPEHGEDRGRPFLLVYSGGDDLLVAGAWNEAYSLPFEVFLLFSHVTGYLPVASLSGAVVLTRKKAPFHLVLRALKAREREAKRAGEGDDPVRVRLAPKGYVSLLRLSVSKSLNVKELESDSENQDTHPVPGPVRFDLALAAVDMLKDVVGALDRKARAYRLLRALRSWWGRGDVGAASALAYVVSRMEDDSGVDLSGTLLSVLPVKPPEDAELYPVGLFDVALIPHLIARRGG

SEQ ID NO: 1313 - protein, 174 aa, Methanopyrus kandleri
MGADLRPAELAEEYLYKPGRLDRNRREDAERRFERLLNDFKAKRIQLKPSDDGLLELAFFTALVSLNVSNSQLRRLYAEITNVRNETRRAREGKGSWEDVVAALGKARVVLAYTKGRQGKEFEGLYEVLDEALRKATKIVEDSEDDDVRRRAIEALHFLAEGIVAFHRFLGGRS

SEQ ID NO: 1314 - protein, 351 aa, Methanopyrus kandleri
VVGIGGTITLVGEIRLRTGTRIGTSEEEIEIGGLDNPVIRDPVSGYPYVPGSSLKGRARALFELAWMKSREIEPDVFFGAHHNERHECGFVRREVYEEAKEYLREDPPWLENGTCPVCRIFGSAGDGIGFSDPGRLEDERRGLGYDPYGRYRDPNDAQELSGVVDVKKEARVAFRDAHPTTYTVNDVFERAGEPTEVKHENAINRVSGEANPRSMERVPKGSRFGLEVVYRVEDGEELESDLKYLMSSLKLVEDQGIGHSTSRGYGRVEFRIAALCARSTGWYLDPGAGEGFPEEEDKDEAADEVTYLSDLEAERYEIVIRARDLEDRAYLRPEEWVERLDEVVGELPWGR

SEQ ID NO: 1315 - protein, 363 aa, Methanopyrus kandleri
VELVLELSLGRFRAGDAIERTRTSVPAQTLFGAILGATLELLRGDGEDPDVVKEVLDALVGGLELTDAFPLDRGGEPLLPVPEHVRRELSDPERYGEVLRELAGDDVDTGTHGLVTEPERLPLSLFTDLCVEGSPTDPATLKRLREWLSGEHDPVVGSGRLTHASVPRTGDDTTPFTLDYASGRGIEGPTHVAFLRYDGKEPDYYDVEALLRAVLRYLRDAGLGGARSRGAGEVLEAGLREPEGEEKLLFSQRMRVEEGEPAITLSACAPEGDAEFYGRVERRGLHYARVGPFVTNYRVPRHYLAATGSYFPEWPGAENLRFEVPEGLLPGFLRGDPMYRGGYELVVYGRGFPVRVRALGDGD

SEQ ID NO: 1316 - protein, 442 aa, Methanopyrus kandleri
LTVLLVRNVGVNDVRVDGERVNEPYYVLKELVESGDLDGVSFPILERVLEELEPDRIVLFATDQDPGSTPRHLKAKDTLYVAEAMRELLDVEVEVRVIRENPSDHDAMLELYGRELPEVLDGAEEVYLDVTTGTPAQSLALALKGLEVEPDAELVYVSESTGTTRIRVGDELLRRIADELLEYGLNDPAARVLSHTGLDDLRTYAEARAAEDRFEFERARELYRGLPEDFLDVSDRLERVERALSDDPVERMAERTRYVLDRALTHLKRGEYGEYVLRTCVAQEMILWTTFSAVSGREPDPDEFVRHASREADWDPKYGNLGDLIRRDPVSTLARYLGDYLEDLTSLEVTDAGRAAAVNALASYYVVKGLRELRDDYAHRAIRITLEDVREALGRSRVDSEYWERKHGHGPDFKFPSEEDDPEAAVEALRECVDAIERAVGR

SEQ ID NO: 1317 - protein, 363 aa, Methanopyrus kandleri
MSGLETVEVRLEVLTPLHVGVPREEELVRGLDYRVDGNRILVVDFTTLPPERAERVLGALEGGDHAEAEGYLEGAEVLREVELRTGGVPDRFLPTYRPTRVDDPWIPGTSVKGALRTGLLLAALKRLDGLGTDLSTLTDRLPRNPKKAAVALDNRLRATVFQGGTARRSYRRKPNRGWPEVFPHADVLRALKVEDARPVGKIRTAVYRAELHPKGRPLDAREFVVSGTFELELGTDHGELKRVLDTWDRVELPRLPKPVFRFLRDVRSGLRDFWEETLENPETVLERAREGWREGLRALSERFRVDVPDDADVQLGWGGGRLVKTALPLAGRVLRGPLDQFAPQTVKLVDGEVPGLVRVVEGG

SEQ ID NO: 1318 - protein, 257 aa, Methanopyrus kandleri
MSRPRPGSRGWMLMSEGVFALIVILLTFTATVGSIHFKHTHPRKQNRLTRLSHARCIVVVTEDLCGGSRYSVRLAEMLRRRGVPMTFAVPAWEAYAYPDRMRKLRELGGDLINHANDGGASYAFLGRPGKVAGLPVKTQRQIIHTTQKWIHRATGVRPDAFRAPGLAIDENTYRALVEEGIWVDSSKIYTRPGTRGGAQVDRDRRPPDPRGTHSVLRGVAVRARAAGGAGVPVLVRRRPVRASQDSDRSPPRRRWRT

SEQ ID NO: 1319 - protein, 54 aa, Methanopyrus kandleri
VFVVLFHEHITANPKYWWIILEFVDYARSHPGVAFATIDEFAELARHGQRFTAF

SEQ ID NO: 1320 - protein, 173 aa, Methanopyrus kandleri
LKGVTVRFEGLTALRDVDLSVEEECGSSSRASTWPRVAYSRVAFGMRYFPSAEGWGFVLLGTVASASVGALVALLCREEKSASAVLNAVASPAMFLGAVVVPENLVPRVAFEIFHRYPPVTFIHALRATDLYGKPVAVADVVVGTVLTATVFAASALVFRRAARELRCRNSGL

SEQ ID NO: 1321 - protein, 216 aa, Methanopyrus kandleri
VRVVLVYDDRRGRRGFRPSWGFSCLVELEGRRLLFDAGGRDRILLHNLQEAGVEPRDVELVIVSHDHDDHVGGLPGLLDGNPGITVFASPSSELDVRRVNRVRNREEVVSGVLAVERPNNVGLLLESEEVLLAAREPGELVELVRWVCERWEVETVIAGFCRYPGAARIRQVAEVLGELGVGRVVGCHYFRPSDARHFERWGIECERPGVGEELEL

SEQ ID NO: 1322 - protein, 209 aa, Methanopyrus kandleri
VFLTGVPLALWGLRLIAAGTGLPLPLVGALAWLFQWVFDENEEPDVVPPSYWVLPRVVLSKPPTWYLERALESPDTLLDYLLTGAVVVSLPLPLTQLVWVLLGGPTGVLEILDYLVQLIGEIMEDPGRTLPEVILWFLLPVLPHVVHVPTWLAALGGLPALLAHAGGLLLAPHFLTHAPAVTFGATVTVSRGGSCPTGVRNVSASGPSP

SEQ ID NO: 1323 - protein, 115 aa, Methanopyrus kandleri
VIEKVLADLNRVAGVNGSMVASSDGLVVAEAVPPEVDPEIVGAIATTVYGSGERVIEEMELGELKQMLVESTDGKVVIIRVDDDALLVLIADPDANLGLIRLKAREAAEEISKQL

SEQ ID NO: 1324 - protein, 227 aa, Methanopyrus kandleri
LVEPIRSLPGSRTRVKLTRECIVIRERGETRRIRLEDVVGVKEHPRRASKALDPAEDTRLVLITGDLERLVLLVRDGRLYWGLKALLAARDGETDRLIRYLTELLRIAGHPPLLERRDGRVLLRWPWLELELGSPERAETVYRELLSRWEELLESDEKGHDLDREARPVWVALSVPLAPMVMTVGVHRRLIAQVSPVLIWGAKLAVDVLERVLGKGPIQCSVAWESV

SEQ ID NO: 1325 - protein, 175 aa, Methanopyrus kandleri
VLCGVGVGLISVVPWLALFAFPYWYLARHALPYVDGPLRFELTRRLGTMGAVTGLWCLLAPLVVGMYAPAVAIPAAAVSIVPAVRAVMACLRAPSEFTIALMNVGTWARRTSAAGACVALVATALAGPVVGGLAELASAVACAYVVSSRVGIASHLAKRVWIPTDRCSGQRPAKG

SEQ ID NO: 1326 - protein, 82 aa, Methanopyrus kandleri
VGVVESTEVPIFRDQEGKARALILRYDPDGGVFVRYGEREDGSWEWTGFRLTAAEVALLKEFFNRIDPLHVQRLESGRRDRG

SEQ ID NO: 1327 - protein, 343 aa, Methanopyrus kandleri
VAVDRDLCPDADLRKVVEALGFFFDPVRAVGLALNLRGHMCFVDGPGAGKTTFLDAFSVAVVSGEGVTREAMVWDERTDRPGVVLHYPAGFVGWDECDSIGSPEVRKLVLEVLDFRLEVVAHGELRTVRHNRRFLFAGRAVPAFPEVDLIRFLGRMQYIGGVGGDIRDRVLSGAVDPRAVEALYERISWDVQAVHLAGCAAEGPFVSGEFAEEIFRGYLRELREAFAAALLEAAKRFPIGAGAGLARKIAMAYVQDKINRFADTVIAFGGPEAVADVVREYYALCDLEAPEDDVECLVHAWVNALMNNYSQWCAEGKIPGPKIAYETIASEDDLDLRFEDVVG

SEQ ID NO: 1328 - protein, 745 aa, Methanopyrus kandleri
VLALLALLLAAQPAAATPTVDVFFEGPPDEDHADILYLVYVSKPGTVRVYLPLNSEVRGVYWFAADELRTVDGLALPPRSEWGRHEVRDWRLTSEGLEWRDRLYAPVGDDWPVRVPIDGIPETVRNAFAGLLERGYADIPVLEARVDPGLLVVEVRARLVSNHLLMYLVPGYEFNAATYESDNRHSYYLEPTDYGFVIEQGVNVPTFEPALVAFGLEDLREYEYWPVKVNYWGWEREGPPYRYHLFPALVPLPVRRRRLAVLLAAIALLPAAAHANPRILPPSPPPPVFVSQITVLDGGMKGNLHEVHVFVRLWPGTEGTVYVPREARIETAAVVPADAVLSSATAGDVRAWCERNHSPAPETAETTFELPEEVSVITWWDEEFRTRRDLFLESRLGRAMKPLLDGVLALRVRADDDSFLYLDLLVPAGWRYLPLGVTSSLLLHPFGDPIPALVRAGDRWYASYANSELLRSLHPDLFLLLLNVEGSWGTRLNTEQLWEKELRRLSEGPETVIVRSVRGDEVLVDVVATVPEIPLPAGSKILKYGTVPRDAYRDAYTGVLAPGFQPVQYRVVREGEMNVPDIGTVEYRVVRVDVSPDRLLVIRAIVPMKNGKLVIPVVGGGTVLGSSYYDRKEAGGFEWLVVEEFEDLKGFRKFEPRRGWDRRPKPLEVLVGLLLTPLLLYWVSTAFGGDTGSPLTVVANFLGELVVDSLPSPLREALKPVTRLVGYCVIFLLGALTVAQGSLPL

SEQ ID NO: 1329 - protein, 442 aa, Methanopyrus kandleri
VRRVLSPAIVPIVVLVLPLPVHGDSWTDPEALLDVGVQSHLVIEDVHEKEVTTEHGDTVKVLDYVDATYMAVIKAKEPGKPVTVHVLLPQGTEVLEARFYPKVSDRSPSEVLSDPSRFESVKVKPKGQTEVTWEFLDETWKWTQLDFEVTPEHDPGKPFSYSLLVLKLRIPALHRVPNLRMYYPKHYDDALRSEYSYGVIEWPIPAQPGYDNSFYVRSGSETLDVGVELFAWPEGVVTKSSAAPGWDTCQARLTDHLMLVFPEARVAVLADVSPAEDYEKWKHQREEVIEKEWPQVTQRFGFPYVPVVAVIGVERVEVSFDLLVPERVDAGSTVTVFVRPYPEPWSYAPEEGVLRFELRDEHGSVMELGEVKLPEGSGFEGWVEFRFRAPEKPGYYTLFVEYEGPYGNGKTSATFRVEGRGKRCKLPIPVVPVIPPRRRARA

SEQ ID NO: 1330 - protein, 229 aa, Methanopyrus kandleri
VGGRVEWWPEPPSGGRRARESGPAIGRSVLLLAIPLLLMVSPVSGVTVYVPDVVDGAFSLEKEGLEHATPVVTSGPVERFNTFENMVVDYEYVSVSDNHDLVVCSNPFDEIDVRITPEGIRVEYQTSRGTVRRSLSFNPEHTYLVLGLQGLRTIPVEPQQGGGELPVLIIHDHRVYEPTTYFPSPILGRYARDVTPLAQAVELMGGYDLLVRLEVDGSTVAFDLVKSDG

SEQ ID NO: 1331 - protein, 333 aa, Methanopyrus kandleri
LNTGKAWRESLPPEEARKLLDLAREDLAKIPQLKSGELEDESGLRLVVYDVTEDKVLLLLARPSLEFIRGHNPRLAELLHVLESTADSLLEWDIFQLSARAREVKDLLEGAGLASTGAIRYLLHPELALGTFLLTSGFGFIAFLPWIELLKRFPRLGEAEFRWEPSALLEYARRLAYVGVLYGAELAYWTCCEIAVKALLRVLGLWDYTVNGRIFDLADSDVWAPLLEEPTKRLMSELSGLPRPLVGAWYGLMEAVTKREIGPGGVNVRNAVLRVVGHAVCATLPLPLGALLHSLWADECDFGDRFLEYWPGVLAPVLAVLGALAENALTGVW

SEQ ID NO: 1332 - protein, 348 aa, Methanopyrus kandleri
MRARTHVLLTYLLTAPFLGVERAITASLSAILPDLDHPNSLVSSALYPLELLTGRDLRLALSRRLRHRGILHCPWPWGALAYLLWATGHPNAALVPLGGFLHCLEDAFTTMGVPVMWRREGGSWRSVRLSLTGLPSDTWDAILPPLALAVTWALFLLNPAEFHATHLDENPYLERAYWTSRAVLLRPFLHTVEGLNREALRVSGYGRLPHVRAVLRYDYGPREVSGLWTPAGWVRGDDGRWYPPPTHGYSLRSLSYERAAYRVGTVRCWDAPEGALVLRAVLAYEGLSPVALERLAREAVLLGFRVRHTDRVGGHLVLEGGGLAIPVLHRLPRPAWCRVTFLPSRSLR

SEQ ID NO: 1333 - protein, 183 aa, Methanopyrus kandleri
LTPWPLPREIEEIVRELPPGAYVASARVEGVPEYDLLSDALRDALGRSSTSPYRVLVDRYLEEVDAPLVFQASNHFQLNHHARRALERLAGSVPVLVLNRGYLPAVECEDLTDELAGTDSAEVEAVFDDGRTVTLVEDPSRLLRALAVAGIGLLILRTTVDESVDFWALTALGLAGLAVSKLG

SEQ ID NO: 1334 - protein, 424 aa, Methanopyrus kandleri
LIPTLLGLLLLTTPAQAADVPADPTLGAGKVVVRFTPSSSGEWLAQAYYSPPRGKLAIVSVSGSIAGSRVELRDRYAGGPLRVSVVDVSEYAPELSQVLTPVRVERRVTREGSTYHVTVIVSNEAEHPVMVRLTYSNWTHLDFGDRTLDQDVSVVLEGEKLELEPFSVRDSRFVRADLVWTDAGGFRYPYTRLGPGDSLTLHLDVTADRSPGKVTVTRRLLLSDPPVPVSLTVSVLRPANYGLDGKKVSFWVPAPGVDYLVRYLAREGDRLVPKSLEGEGEYQGVVSVELQGEPELVSVYLKQPARMVFEVRDRVKLSLRSGSNGSSRLWVRWASESIPGGLATDVRLKGRAGRVLLGLVLDSTGEANVDVSGGTVLERGTLPSGRAYAILDAGPVNGEKVVRVTSNARVLDVLSKVVDNPGVA

SEQ ID NO: 1335 - protein, 62 aa, Methanopyrus kandleri
LLRLIKRILWGILSYLHEIIYLEELLLAIVDRTIVVLLLPIRLPYRLLETVRRALRRGLTGT

SEQ ID NO: 1336 - protein, 164 aa, Methanopyrus kandleri
MFLVRVLLTDPVGPHLEAYGTVPPEAWSLLEVVLQSLEGRIDRLLGLELTPASVALESIAGDVGVVLLTSTDPEPVVRSVRRVFGSCDVEGVYREDVGEAREELEDMVPEDTIVSRELDVLGRDWCVLGAGTALLSGGKVPALEEIRPGEIRAWNSFSREWFRA

SEQ ID NO: 1337 - protein, 862 aa, Methanopyrus kandleri
VVARWAVTIPLILLTVGPVAGQPILQGSSSDDWWFGWKYVRSEVFQRWVDAYSPDGPPVLVDAENMSAPDVLYLPDRDVFVVCGTSEVSVGPGRVEVSTAADGFRESTSLDVRGPAVVDAWPDLVAALLDDTVCELRILREGQMPPYEAVIRKGEREVARETLDMEDMLREVVEYAVYPDRVVFRVLGRPVPKSLNPSSPPNRVIVYTITFLPREGRILVSRTVSRDPRLLYRLAQFASTYSPTVQVGVLKTPSGALPLFARFQPPWEDPIIEAVDRAVLAWRNADEAELREVLREHPNVRLPEPWWRRSGGNSVWTPLPPFAPVRPGRRRLRRLAALVLLALPLAVAPASATTVTGGALGDYQLLHECRERALQELTGGAHVTVYVNPSGRSYTCTYRPEDGSFVVGPSSRLSPWDAIQPKLPDPAVISVGKYLSSYLVYHAGRTYLVAPVTDLGPVVYVLEGDSVRAYLAPEWVSTLVGRTRWADATFELSGRGCTLRYYLIRDEDVVELTVRIDFSAERPEFWGRVVSDPRAIKEIEERAERVERLSGRVGGVVMHSLEGTRPVLVTFELPEDHPLRRFIDEGIDIATDPVNTSMSRLLSWWFEWKRRFPNVELLPDPSDPTAGTLCAVLREPWLAIVPDLLTAVCALPLDLALTTLERRLYDALEPRVEPWIRDPLGRFLAAVAYYVPVGLLEELLGRLLMPPVVRSAVIPVLPVVGLRVPEWDVDEDVKELSERALYCAVAPVVDTVAMHRVAELVGSPVIAAFTYALLDTLWKDRGRWLDVGYWLAFPVTILLPAIGGSVFSLLWSSLPQPLAALLYGLRNTRILTSPPAVVPGSVHRLVQVLTAVALWTPLGAPT

SEQ ID NO: 1338 - protein, 279 aa, Methanopyrus kandleri
VRLPREEVLTRVLDANAVDLYDVEMLFDASYPGGKVRAYSVLELHPPREGALLHPQLRPRRHVLGPGEVRPREALIWGWAGNEPVVRLLRPAVRVIERDGRRSIECAVTGSAWVGEREARVALRAEVDPAHPAAGDPRGSRRPLGPDILPHDPSRDPGPSASASWCAPTTVASWGRTSDPRGPRGGPPVRIEVPRRDGRRRGSGAADLLVHRWYVTPASPDWTLEPATDLTWIATLDDRFGRWTPILELRLTADPILPVHPRLVPDGLIDVPLGVSSAS

SEQ ID NO: 1339 - protein, 76 aa, Methanopyrus kandleri
MTVSLTRALGMPSDVLHRPVFVPRLPPEYALVGLAAYLTALATRHYLGPLDYLAFSALVPAEGFFVGCRSPSGGSV

SEQ ID NO: 1340 - protein, 167 aa, Methanopyrus kandleri
LSPTATRPLETADLVPGTRARGPRHVAEVRAHGAVVVSLPLPLAQIEWILALFGPRYDIFGALDTLLRVLRTLLAVPSNASVVLSALLPTLPYLLPVPPWLERDVDGFHLDPLLRQTVVPGQPPQSRPQEAGARVVPAPHDRGPQGIPGRRVRSTGTYPCRRFLRPV

SEQ ID NO: 1341 - protein, 203 aa, Methanopyrus kandleri
LVGSRIPIPSDPVERIRALRVLREVYRRGKKPSLEVTYRTVNGSTCGPYYVARWRCDSRFKHGRTLYLGKPENESVSFVEWLVSLDRNEVLKLARHLMRNLRSVLKTLLTEISNLPYKRARRVLARGLALTFDARPSNSPRIRDVLEELPDRLESFLIRTLGGWPAHYSSHLNKIIRSRRKSLDGKHEIPDVLLELERWKLEY

SEQ ID NO: 1342 - protein, 290 aa, Methanopyrus kandleri
  MISC_FEATURE (169)..(172): selencysteine
LDVRSLYGLALDVTTLAVLELVKRYPASGEKLPEDRNSVELVLWEVKDLFRRFELGRLVDEEEFLEACFEVLRLPGVPVRVGGACEEAGLETLRNVFTDPDASVLFITSRGLDVFEDVMDGLGMDPKDVRAECRRLLVRDDGAVGEDAIESWVEAGFEVRVITDGESHXXXXYTDNVMAITGANMTNVSLERLRECREFVAPVVMDVKAPVALLEYEPLGFAAMVGANAHAVVLREFLTEPDRVYGGYLPECEGLRHLYRELRAGLEWYLREGCPEMLWWVEPEPRTPDL

SEQ ID NO: 1343 - protein, 285 aa, Methanopyrus kandleri
LSFHVTVDVTTECPHDCPHCNLRGTRRAGHLDPEVLERILAEVADRYDLDFVILTGGEPCLHPRFGELVELCRRYDAGVGVNVATEVHPALADVDHVYVALEPHRGYGLEGALRTWEEVARLEPDEVYANTVACRDTYGELRRVNEVAVELGAAAHFVIAYVPPGPDDPLDDYPHDELPGLVRGLRRACLAGMPYQEEVPFSSCRHGEYNLHVRADGELTPCQHWKTYTLADLDEFEGMRGLEPEGPCRDCPRFEECQGGCNAYAWNVAGRLMPDPRCPRVRGSP

SEQ ID NO: 1344 - protein, 319 aa, Methanopyrus kandleri
LLPYLVLGLVLALAPASGELLIRGSLSEDKAFLKEYLESEVLPKWKDDPRVIVDYSDWHHRLVYLPDRDLFVGTDGPATVTVGPGSVRVEVQLATVTEAGRESIQVSKSVRDPAVVANSGFDSVTVLVGDYVCGVEEKLVVGGPPYYIAVLKEGDRVIDREDLGGLSVSDVEYEVYSDRVVMRVLGFGEGGKPLAIIVTFDLKDGRILVDREEITDAALIEKLSGELVEYPEGAVLRTGSGVEPLYVKFGAPRDDPLVRFIDKVVRMYGQGASEEELRRVMSEHSNVEFLFPERGGGEESGLPVWVLPLLPVPLTVRRR

SEQ ID NO: 1345 - protein, 85 aa, Methanopyrus kandleri
VAKMVNSAWVRLKSHERKLEKARTVERVGRFRLNLATLGAVVGLALAGLSVLQPTLLGTLGTFLSILAQVVTLAVQLASLIPLPT

SEQ ID NO: 1346 - protein, 247 aa, Methanopyrus kandleri
MREITDSPLAFIPALLGPVAGLYVTINGLSVEIRCRHPAGWMYNDAAVILPVTAFRDLLFPLVSVVIFKTAIERLRPLGPFGLFVAPVIAAAWEWAAERAFGAVLDRWYSRTTLAPLVEEPFKRLVAIELGVPGVVSGLAYGLLEGLWKSRTLWGRKDVVSLLRYIALNYVFVHALLTVLPLPIAMEVHYHLNASWFPEPEKVHLLVIQIFRDLLTGDIRTMLSMSYYTILSLMLESTFGIPVMMKI

SEQ ID NO: 1347 - protein, 243 aa, Methanopyrus kandleri
VADYLEALSCLKSHDLDRCRLVADDLPIHYLTLIPSADLLTDNRPQTFLERNELRVQTSFGEFHVGLRTPAVVSGCLENVLLRLGAPAPVTLLRDGTAAFVSPIGVIFARLDGRVVPEAEIRYEKYWRSASNFFRAPSADYYEYRFDARRGVAEVRFYDLERRIAVTVSLNFNGKSATFSESAIDETTLRELRSRLKRVSEVQDAVLVRTPDGTEVVWVEFGVPGPPPGLTSRDGTEDPQHHA

SEQ ID NO: 1348 - protein, 249 aa, Methanopyrus kandleri
VTRNSEVVDWLHSSNGPTWPLSNWVKAVKYIVYVAPERKEDPTPLKVVQVAESPNTLDCSTKDVPYWGEVTWGKVSERDFANAVQAMNGGTLESQLFKAAVRIAYWVASKIPARDYSTPGDMDWTEFTPLQVLKEYWRGWNCAGHAVLAVALMRAAMIPAKVVGGLLAGEGHAWVAFYNQDFRWVHVDPTGDAGNSYMQLYLAPRVITDDDVEAHSGYYCDDNATTIDDIEREWIPVAPIVVVAALMIY

SEQ ID NO: 1349 - protein, 1190 aa, Methanopyrus kandleri
VGWCENVMTAYRVRAQGPRVVRAVVVVGHQPYSLSVAKAAERLKGEIDVEMFYMWDLRERPEEFEEAMRRADFAVLNVMDSATAEAVDLDAIAEETPFVAVHSCFEVMRASFKSLGLEKSRLFRFFGRMMERRKDNLSGVRMDEALERGAKFAERMGWFGALKKLKIAMRAFRYWDYGGADNVENMLLYLAGELAGADLREPDPPEEVPGRALYDPEEGLIDVDFLRELREEYGTLVPVTFYKFFYTNGNTEHVDAVIEALRERGVGAVGAYCSIDAYGTLTRFFGDERPDAVVALTCFRIVGGPMGGEVERGIELLRRWDVPYFVAPQVWYLDREEWEENEFGMDPLSLLINVSLPELDSAIFLPPVACQSEVGRFEDVPLHAMEPIRENVDRAAELVYRWLELRRRGPRRVAIVLFNYPPGEENVGEAAYLDTFSSLRNVLELLRDGLDLEVDLDRVTDDVLRRLGNPDLRHRRPEDVPAADEVPLDRYREWFEELPEGSRERVLEAWGEPEEDPLLVDGAFPIFGLDLGDVFVGFQPTRGLHESEESYHEDTPPTHYYVCFYEWLRREWGADVVLHFGTHGTLEFLPGKEKALSEACFPDLLITPIPHVYLYNVNNPSEAAIAKHRTYAYMVSHLHPPLADPELKGYRELLRLCEAVREGREDVEELREIAKAAGIRVEVEDDDAYVGAVESMVRRALRDRIPCGLHVVGADPDPELVAETAVSYAESRDLLDADREEAVEVVREYVEEGEDRLSEVFADPDAVRELVDGLIESYDRETESLLRTLRGDYLEPSPGGEIERNPEVVPTGRNLTALNPRRIPTPEAEERARKAVRELLERYREEHGEYPETVGLVLWAFETMQTGGETVAMIFELLGVRPVRDDAGNVIDVEPVPAEELDRPRVDVVVTMCGIFRDTFPNVVELIDRAVRKVAELDEPEDVNPVRKHVRELREEGHGRPESRVFGPRPDLYAADNMRSKVESSDWDDESELIDAYLNDMGYVYGEGVHGEEARGLFEAVAGRQDATAQVRSHRSYDIIDLDHYYEFLGGLTAAAEDAETYVIDSCSGRDPEVHDLETVVRSGAVSRLLNEKWKRHMLKHGYDGCREIAKRVEYLVGLAATTDSVEDWIWEGVAREYLFDEETRERMEELNPAAVREIASRLLEAHERGYWDADEETIERIREIRRKFE

SEQ ID NO: 1350 - protein, 204 aa, Methanopyrus kandleri
MTASTLITESTFDALSGLEPPPEVGILVITAVIATVPTVVAIRIGGILGRVVAYFLTVALTFSALPLILHIQRGLELGPRELLTLALMMSTCSLSILRLATEGLKLTLGSAVAVVNLAGGFALLVVAVTGGWESLELALSSHHWFRLMVVPAILTVLTYWVYVAVRDVLDWLRGRRADPRDLEAAEALLEGVRACERRLRRVSE

SEQ ID NO: 1351 - protein, 277 aa, Methanopyrus kandleri
LHLASRISTDRRARAKAEGLTAFGSALQTLSVGIAAALGTRLGDGEVEVTNRAVESLGIRPPFDEEKYLRGLTSVRDDPNRAYETMYRALWRWPRKVFRELHRTLEEDQAAFAGIVDYLWEEIIRQARESPALDEFVREVGKGWKVTREAAEATGLAGSIAGTVGDLLRRSLSRLHGGSEGDRDRSERRDEHRSWRLGDAISQYSGSSEGTSPLSKRTGDAPRGRGEVARDPGFDGVDGAGRSGEVPRTRPREPEGTARGGRGTGRGRRGPWRWLRR

SEQ ID NO: 1352 - protein, 305 aa, Methanopyrus kandleri
LLEILALTVLTVPEDPGRFLEHVLENPKVLLAAGGGRGGAAGGRGGGFGGRGGGRGGGAGAKLSPRAGEILESRGKFLRELRRPRSNLKCCPSRHSERERRRLLRLYGKVRVYYSTVPPTLTIGGIVALLSTPFTVFLPLRRALNRVWERRYGPRFRGGDPLWYLRYLDEVRRFNERIAGRLWAISALSLLTVVAEGELSYQAAYAFADAVVEGGEPLSAFYDWAVLGMEALLAVYVATSVVIALHLVRTRDPKHRRYCPIFRACLPRPYRRRAWRTLRTLTVPVSILPVITGAWALRWGLWVLS

SEQ ID NO: 1353 - protein, 278 aa, Methanopyrus kandleri
LLEPLTLTLLALPGDPGDVLGPVLEHPEVFPAMGRKGHDGERWTGRRKRVQRVDAKLSRVGEILSGRSPGTRKGSELRKRYPERKRERLLSLYRRVRLYYRTVFDELVRLLVALLVTFFMVCLAVKAAGEDSVANLFRLAGISIIVDIVALIAFCEIVLTAVEDFADAVLAGESPEAALDAFYGGAVLTLGYSLIAYAAVALWIVRRTSRELDVRTLVQASILILPLVAGFRALVWGMWVTGRYADVVPQLLGFTSVLIVIYLLVRLNLKLSKDRASP

SEQ ID NO: 1354 - protein, 309 aa, Methanopyrus kandleri
MEPLTLVLLVFPGDPGEHLGHALLEHPEILSAVGGGRGGVAGGRGGGGRGGAGVKLSRAGKVLKSPKKFYRVLKRLKRRKHRPERERRRLLLLYWKVRIYDRIVPTALILSGFISFFVVPPVLDFLSDRLLRKAWERKYGRRFRRTREWRHRCDYELSRLCDDVTYRLFLTSLLGFLVVGVEGIFSTWAVEAFADAVLRGEGFRAALDAFRWYGVLGMEYLLAAYAALCVAIAASAVARTWERRRTERLREEVRRRLGRRPEKSDPPSCIPESFRTSVSRVTRALEALLLILPLVTGTWALRWGLWVLS

SEQ ID NO: 1355 - protein, 239 aa, Methanopyrus kandleri
VIAGGPGSGRVVRAGGPGRGPRAGRRAPRGPPGQGRGGGGRGGGGGRGGAGAKLSRAGKVLRSPGKFLRALKKFKVRKRYSKRERKRLLLLYWKVRLYYRTVAEGVLLYASFALAIVIFALDFLTDDLELLRETWFERSLYLTSGGAFLAIFGEMVVANRAVSAFSEAVLRGGGLPAALGAFRAWAVYGMGMLLAMYVALVPLIIALTRKEPDVRTLPMLAVPLATGIWALWWGLWVVS

SEQ ID NO: 1356 - protein, 205 aa, Methanopyrus kandleri
VHHTASEMLAVGAALGVSGGLAPGPLQALIVAETLGNGLRAGLAVAVVPVITDGPLVTAAGLAAARLPGWVLRYLGLAGSAVLAYMGLSLIREADSAEPARSEGAGSSLRRAVVVNLLNPHPYVFWLTVGSSMMGSARSLPEMVAFPVGFFLGIVSTQAGIAVAVHRALSLTPAERVGGARRLSGVLLLGAAAYLAYVSLRDMPS

SEQ ID NO: 1357 - protein, 81 aa, Methanopyrus kandleri
LRRREPTYQVSLDGLRESTSALVIPPTRSRRVYALDRVLERPHSVLGERVGSYGQLEGRSSQSLTRIMETQNEIRQDPPSE

SEQ ID NO: 1358 - protein, 242 aa, Methanopyrus kandleri
MRLWESLVLAMLSVPEDPGEWLGPVLGHPEVLLAKVGRGGGRVGIKFPRIGRTSKSERLPRVKIKNWGYYPEREREERERRERELLSLVYWKVWLYHRMVPPYLMKAFVVLLLGGLGLVALYCLGVLKRTWRYALLTSVLAAVLGVLPEAVMTNYAVEDFSNAMLAGGGLQDCLHAFKVWGVYGLWTLLAAYVMLVLAAVVLARNALRDVPVPVLALSLAILAVPLVTGIWALDWGLWVTMS

SEQ ID NO: 1359 - protein, 585 aa, Methanopyrus kandleri
VRLPVVLTPSVLGILLLLSIHVARPVNPSSHYALDDFLKVEFDGMRDGIVLKFPVALDGEVVYGSSAPGRYPYPVYRYRDPLEGGIANVWIEGLPYIGRSGVHTFIFKVINTEGRPIFYGEVQVRRDPRTGRFQVLRGSVICGPFVYCPRPDGCVIRYRTLEPVRTELVVRRPDGGIVTRLEDGKPRTVHEFRVTGLRPDTEYELIVRWNGFELAKREFRTAVPDGAAGFTFAFASDSRCRHLKESAGGGDADAYGCNVEALRSIMMFAARHGARFLVFPGDLIYGHATPEDARLQYWNWKQAVAPWEPSVPVYVGYGNHEAAVVGSGGRCSGEEVFSREFVTPAELGRGPAGVSEGRGLPPYGDTVYWFEYGCVAVVVLNNCYSGMLRDWTGPGECPYLGYVMDRQLRWLEETLDRLDRDPTVRYVFVAAHLPPYRLTEPQELSNRLRPVVNGRPVGEGYVDRLNRLLEVLMRHRKVVALLCGHDHCYARYLIDRNFPMYPKGWRGRDIRREPWFRPLWVIIDGNAGAPMFTLADSPWKDRVRVFTTRSAVVVLFHVRFDRIVVEAYDATTGERVDRFEIPAPG

SEQ ID NO: 1360 - protein, 206 aa, Methanopyrus kandleri
VATLLEAPRIVERWLRGMEERGEYEPAWGDREDVYSVALAGVLHQRTRRELAEPVLRELLRRYPEPSDLLKAPEDELKESLARIGLVERRLKAVLGLARLLSEDPEPSGEDLLSVPGVGPYTADLVRAVVYRERVLPVDANVRRVVRRSTGRPVGDVGAEWVRAARDPRDLALGTVELGRRCCRPEPECEECPIAGVCAEQGRVRG

SEQ ID NO: 1361 - protein, 706 aa, Methanopyrus kandleri
  MISC_FEATURE (92)..(99): selencysteine
LYTFVVELSIATVLFISSVYLLAKSVGFDRDRAIAASVLAASGMLPQWEWGGTYPMTLSFGFGLLALAMRDRRILAPILLTLSLYSHPLGGXXXXXXXXMLLWGAFERRPGYAVSVGVAWALALPHYAFFLPYARWLSTLIDSPAPDELFRMLLLPFPDLVSPGAFLLALAGLGLWRARREPWARVTGVCWALAWGMVAAYALGLTRHLPFGRNLLLDRFTCVLITPLLALPAAYMLRDRARHVRIASKVLLVLSISSAALPLSDSLSCELPTVPGSADVVAWVKEHRSHDPIVRVEFLLATKRYGKPHNALWVGPRVKGFFAQGDPYFHALTERMEWEGFWWYDPEFVRTVCRLCNIEYLVVSSFPTVKSGMAAGLTPVYKSKWIRVLENRRIAGAEAVDPIGVYDPRSVREVVKEYTTALNLVPKRGYRYIFAVVEDPRELSAFRKVLIRPESPEDVRLAVRLAREGKRVLLVLPAGDDRIAREVSRELGVHPKPAELRLRPRYPKPILPRSLRTTLILKGPKRSEKVPPGYQVGGGWFRDVRVGRGTVRVVGVDLPVVAIRLHPTYVNVGKDLGKIPPLPGPHERRLYSRILDGFGSGLHPIPCRFDPRSARVEVIPSGYQWALVKVKHFPAWHASGGRILVGPGGTMIVRTHSERVILYFAYPTRLYALGAVGFALGALALALRARPDAVLSVIPGQRPESD

SEQ ID NO: 1362 - protein, 943 aa, Methanopyrus kandleri
LAERPEERQWKEWEEAGLFEADPDDRESVYITVAYPYPSGSMHVGHARTYLVPDIYARFKRMQGYNVLFPMAFHVTGTPVVGIAERIKEGDEDTIRLYRDLYGVPEEELEKFTEPEAIVEYFAREYEENMKRMGYSIDWRRKFTTVDPEYRSFITWQYLRLREKGLVDKGEHPVRYCPHCENPVGDHDLLEGEDATIEELTLVKFPVEGDDLILVAATFRPETLYGATNVWVKPDEEYLVVEVDGERWVVSEEAYRNLRHQKDGVEKVDTVRGEELIGESVVNPVTGEALPVLPAEFIDPKFGTGVVYSVPAHAPADAAALEDLKKDPSVLEEYGVDPSVVEELEPVQVIEVEGYGEFPAYDALEEHGIESQTDPELEKATQEVYRAELHKGVMVVDEFEGTPVREAREEIKSRLIESGDADVMYDFSEKPVICRCGTECVVRILKDQWFLRYSDGEWKERAEELLGRMEIVPEEVRANFEDTIEWLDDWACARRVGLGTPLPWDPDWIVEPLSDSTVYMAYYTIAHRLKGKGELPPEVFDYVFLGEGDPEEIAEKAGLDVEELEAMREEFEYWYPLNWRLSAKDLVTNHLTFFIFHHAALFPEDKWPKGIVVFGMGLLEGQKMSSSKGNVVLLSEALDEYGPDVVRLFLATSAEPWQDFDWRDEYVRGVQRHLERFETLIRDHADESVEDKDAVDRWFLHEFREVVEETTEALEGFQIRRAYNRAFYGVMKLLREYEAMKGHVKILGEIAEDWLKLLHPVIPFATDRLWREVLGEDSFLLEEEWPDPSEYPEEPELSVAKEVLDRLIEDVRDVEKVIGAEPGYTLHVYLAPEWQWRALELILKDKEFGEVMSELMKDEGLREKGDEVAKIVQELTKEDLPEDVDVDALREALTEFLEAAGRALTDKTGASEVVIHTDPEEAPGPEDRKAGARPLRPGIWLEE

SEQ ID NO: 1363 - protein, 324 aa, Methanopyrus kandleri
LATVAVLGFGNQRLYERIGAAEKLGGEPPFGGAAMAIEFAEAGHDVVLADPNLSEQDPEHVDRVADAGVELTEDDAQAVEGAEMVVLFTPFGATGGIIREIASHLEEGAVVCPTCTSSAFEIHESLYEAGLEVPEAVGVMPAHPAGIPGTENHRAYITARGTGNGTVLATEEQAELVEEVLSSTGKEVFELPHVELVSVVGDLSVVLLKRVIEALKEFCAVKALGAPQEMIDRQAMMTLATLAALIEAGGIGGLLETLDEEAIEASYSNMEPFVDGVEEPEGEPVERFVVLPGEATREAVIELVGERGWRTVRMRAWVDLYKKH

SEQ ID NO: 1364 - protein, 485 aa, Methanopyrus kandleri
VSLEEVLDEIRREVTPDPEERELVEGFARRILSEVRDRLKERDPDAEVELIGSVARDTWLPGASDVDVFCVFPKDRDLDEIVEVTLEVGREAIEALGGEAREEYAHHPYIGGEVEHRGRTFEVDVVPCYDTEPGEVITPVDRTPHHNRYVEEHLEDTVEARLLKAFVKAIDAYGAEVRVKGFSGYLCELLAIHYGSFEEVLREAVRTWRPGFVIDLEGFVGEVYEDYDEVRETFEDQDPALIVLDPVDPERNVAAALSRRQLTRFILAARAFLGDPSPEFFRGRKPEPVSGEKVRDWFERNPTHVVAIEVRLPDEVEDIYWPQLEKTARSLSRVLENEGFEVRRWHVMRDSEEEHGYVLLEFEHGKLPELEWRVGPSGWVREDRVRGFVRAHGRFWVEEDGKLATRAERKFVRPEDLLGRLEGADRQTLLSHGFGKDLARSSEGEVRLLSAEELAELADRDPELGKALAEFMRGDPLSELVRDRL

SEQ ID NO: 1365 - protein, 188 aa, Methanopyrus kandleri
VSRFRAFISIDIEDEEVVNRIVEVQERLKASGADLKLVEPENVHLTLKFLGDIPESRVTDVVNAMEKAAETVEPFTMRLKGIGVFPNPNYVRVVWIGVQEGSDETKAMAAVLEQELGRMGFRRERKDFVPHVTVARVRSGRNKGRLIEAIRELSNVEVGEVEVDRIRLKKSILRPQGPEYHTVEEVEI

SEQ ID NO: 1366 - protein, 336 aa, Methanopyrus kandleri
LGYPVREPGMGKEVVVDSLEAFNAYAREQWLGEVVREGTILFDTGVVHSYAFKVVRVVPSGMGRITSSTRFVLRTRFEEDRMEIPNLTLDDVVGHEEAKRACSLLVEYLKNPEEFRDWAPKTVLFYGPTGTGKTHTARAVAGEAKVPLLHMNAAEILGKYVGEASERIRRAFTRARKAAPCVFFLDEIDALALDRRYQELRGDVVESVNALLTNLDRLKNEGEGVVFIAATNQPDILDPAVRNRFEYEIEFTLPNKREREELVRYYAKKLPMPLDVDPRYIAARTGGMSHREIKERVLKRALLEALREGAEKIERKHIQKVLNQERERRAVRIYHR

SEQ ID NO: 1367 - protein, 334 aa, M. kandleri
  MISC_FEATURE: selencysteine
  MISC_FEATURE (16)..(16): selencysteine
MSRKKSLVEMADLHGXACKLPQGDLEDLLKGVELPEEGGRVEVGVGDDAAVIRVDGGYVIQSVDFFTPIHPDPYTQGRIAANNSINDVFAMGATEVLSVLVVSGFPRELPEEDAREMLQGFADQCREVDALIVGGHTIMNPWPILGGCVTGFAERYVTVGGAEPGDVLYLTKPLGTQPAMAALRLPEDVRKQFLTDSELEEAVDLAVEVMTEPLKDAAEAALEVGVHAMTDVTGFGLKGHAGEMAEASGVRVVIERLPVIPGTTELSRALGYGLERGESAETAGGLLVAVPEEHAEDLEDAFERRDVWYRRIGRVEEGSGVEVRGDVEEVEDYP

SEQ ID NO: 1368 - protein, 209 aa, Methanopyrus kandleri
VLGKGRPLVVRGRTVEQVWRQAVTGIKVHGEKVERERGPVKEVRGLIAHLEPSGPESFDIPDDYPLDEHSVRAYEDQLLDPELRGFEYTYGHRLRRYFGLDQVTKIVERLSESNNTRRAIAVTWDPRRDLDEEEVPCLTALQLQSDGGSGLELHAFYRSWDVGKALVANMIALRRLQEHVAERAGLEPTTLTVYAANAHVYEEDLPDLP

SEQ ID NO: 1369 - protein, 295 aa, Methanopyrus kandleri
MKTGTWRVKTGFARMLKGGVVMDVTNVEQAQIAEDAGAVAVMVLEKVPADIRAAGGVARMCDPAKIEEIMDHVTIPVMAKCRIGHVAEAQVLEAIGVDMIDESEVLTPADEEHHINKWEFEVPFVCGARNLGEALRRIAEGAAMIRTKGEAGTGNVAEAVRHMRIIRREISELTRLDKEELYGKAKEYGVPFDLVAEVASLGRLPVVNFAAGGIATPADAALMMQLGADGIFVGSGIFKSDRPQEMAEAIVEATAYYDDPEVVAEVSKNLGDEVAMRGLEISEIPEEERMQLRGE

SEQ ID NO: 1370 - protein, 187 aa, Methanopyrus kandleri
MISEDSGSNEDREVKIAVIGPEDAGKTTVVRQLSDKFTTVSPRGKTVGIDFGKCKYYEGVYMFGVPGHLRFKFVMRLGARNADGMILVIDSADPRIDKAVKIYNIVKSVVKNPHRVVVFANKQDLPDALSPEQVGELVKRALGISPPVIGTVAIKGEGLREGLDTLLFQPTYNGTNEIDDIEIKGIR

SEQ ID NO: 1371 - protein, 310 aa, Methanopyrus kandleri
LPVPVKNRATLAQLMLSYGITICVDEDVLRAINEMTFGQLPMILDESVNVPLEYEENIIDAELVSLLEFGEDMVSSLLDMIVVVRVNAVNGTGTPWELLNTILLADNPGKVELNGSYFSIFAIDERQIVYISSSGRRRIPYTDLTYMKDISEWVNARNIMSPNYAYIYDESALNITEDVLKKRYRASIKGLSELLDRPKHWVRIDTTITEKKDGILIRDRLLDWIEPLEFTKITVRRDVDEPAIEAITGESKVNKVYALRVFREIKPGFKTYRELVERAQLPDSIVKSTLALFTRFNFLMYSFKYTPPII

SEQ ID NO: 1372 - protein, 139 aa, Methanopyrus kandleri
VPVYKSAGVEYKPSLYVIPMCFQGDLIAGELAVATLLFVIIVGSLSLISLRNAIHARDKGRVVLHIGMLTFLASFTYAAFRMVQSSLFVPVGPPSPRTVAVPPAIVSGNEINMVFVASLIGLGLVVVGAIASMTRRIRV

SEQ ID NO: 1373 - protein, 252 aa, Methanopyrus kandleri
MSVTKVYFVGAGPGDPELMTLKGVRVLRRADLVIYPGSLIPRESVEEWAPNAELIDSHGKTLEELVETMVEAVEDSRTVVRLVSGDPFVYSSLYEQVRELRRRGVDYEVIPGVSSVNAAAAALGEELTKPGISQTVILTRPAGRTGKPEGESLSELAEHGCTMVIFLGAAYLERIVKSLLGGAYDEDTPAAVVYKASTPEEKVILGTLGDIAEKAREEGIDRTALIIVGDVLKEEGKRSHLYSEEYARRVRR

SEQ ID NO: 1374 - protein, 254 aa, Methanopyrus kandleri
MIVGKLYVVGTGPGDPDLMTVKAQRVLRHVDVVVGYRTYVDLIEEILPEDVEIKRYGMREELDRAREAVRLAADGFEVALVSGGDPGVYGMAGVVLPIAVEEGVEVEVVPGVTAACAASALLGAPLMLDFAAVSLSDHLVPLEEILERVRAALEADFVLVVYNPNSSERRHIFEAFVDVLEEIVEEDRPVGIVRNAYRERQSVEVVRVRELRDLADRIDMRSILIVGSSRTRMVGDWLVTERGYSSRTGRNSSE

SEQ ID NO: 1375 - protein, 134 aa, Methanopyrus kandleri
VGGVPRFWRSIDNRYRLVGTRCKNCGEVFFPPRVVCPNCRSDGEMEEVQLSGRGEVYTYSVVRVPPEGFEDKAPYVVAIVKLEEGPLVTAMIVDCEPGEIDVGTPVEAVFRRISEDGEDGVIYYSLEFRPVREE

SEQ ID NO: 1376 - protein, 394 aa, Methanopyrus kandleri
MVCVRFRRDVAIVGVGMTRFGELWERSFDDLFVEAGLEALEDAGMGGDEIEAMYVGNMSAGRFIDQEHVASLIADRSGLTPIPCTRVEAACASGGLAVRQAILAVASGMYDIVLAGGVEKMTDVTTEEATATLATAADQEWEAFHGVTFPALYAMIARRHMYEYGTTREHLALPPVKNHRNATKNPKAQFQFEITVEQVIESPLVADPLRLLDCSPVSDGAAAVIVCPLEMAKEFTDTPIVVRATAQASDSIALHDREDITTLKATVEAAKTVYKQAGVEPEEVDVAEVHDCFSIAELVAVEDLGFVEKGEAGEAYHEGMFEIDSDYVAVNPSGGLKAKGHPVGASGVAQVVEIVEQLRGEAGKRQVDGAEIGLTHNVGGSGGTVVVHIFERAD

SEQ ID NO: 1377 - protein, 350 aa, Methanopyrus kandleri
LIPSERVGIVGYGAYVPRYRIKAEEIAAVWGDDVDSIKSGLMIEEKSVPSETEDSATIAVEAAKNAVARAEIDPKDIGAIYVGSESPPYAVKPTATIVAAAIGATPDLTAADYEFACKAGTAAIQTCAGLVASGMIKYGLAIGADTAQGAPGDPLEYTAAAGGAAFVIGRKKLVAEMEGTYSYTTDTPDFWRREGQPYPRHGGRFTGAPAYFKHIIRAARGLMEELDLSPEDFDYAVFHQPNGKFPRKVARSLGFEPEQVEPTIVVDRVGNTYSGSSLLGFTAALDRAEPGDRILVVSYGSGAGSDAFSFVVTERIEEVREKAPLLEEYLEDRVYVTYGEYAKMKKKLKF

SEQ ID NO: 1378 - protein, 249 aa, Methanopyrus kandleri
LNHPRGVISLPRSLVLKRIVGDIAASEHPGKVMRKWRKVFHASQVEVARRMGVSPSVISEYETGKTKAPRVDTVRKFVEALIEIDEERGGNIVSALENVLFSEELLVTLIGIGEFPYPRKLEEVYEAIEAEPVVHHGNVDVFGYTVIDSVKTILEVPARSLIRVYGECPNRVLVFTRIDRGRSPMVAIKAAGVKPSAVVLHGIDKSEVDDIGIKIAEVEGINLATTTESISRISKRLKELTEVQPGDRG

SEQ ID NO: 1379 - protein, 555 aa, Methanopyrus kandleri
VLDGGLTLLVLTALALFRERKKRPQKVSVVIPAYNEEKTVARVVRAAKECDLVNEVIVVDDGSEDRTAEEAEAAGAIVISHSVNRGKGEAMKTGLKHASGEIVAFVDADIKNIRPEMIEKMIRPVLEGEADLVKTKFKRKAGRVTLLTAKPLLRFFFPEVAHLEQPLSGQICARRKLLERVDFEPDYGVDIGIILDAVALGARIEEVDIGEIKHEMQPLERLHRMALQVVRTILDRAHKYGRVVLRWNVGKALNRMNLGVSLLALALATLFYTELPLASVLALGILGLGIALFSLAQLVYELLRVEGKKRRILRPFLHMHASVIMSLAVVAVLVGAMFSSIQIAHDRVEVNPLPRKVVWGEREVKAEGPYVVQYGRELKMGRNVLKVLDLKPDDVLVYQRGEYRVESAGRDNLLMVPTELARQLGIKPGNATDSEIRLAFRNITVKRKVEGPDVNIRVTAVLSATPDRAEALTVYVDGKKEAWIPVATRGGSVYVYVSGYGLIKLEDRSVVYVGNREILLKLEDTDIETLLLAPAEPTPFAVIELKMPSVRAVVE

SEQ ID NO: 1380 - protein, 514 aa, Methanopyrus kandleri
MRELLAVEPSPGADLRVCLTYPNEYRGMASNLGFHIVHRILAGIPGVSVERSYVPTDAYKSLDPNRTLVSLETGSPLSEFDIVGFSLQFELDYPHMLEALVMGGIPLRREDRDENDPLVLVGGPCTVNPKPLEPYVDVFYVGEAEAGLEEGIEAILTARDRRDALEELADLPGFYVPEYPGTVDRVTVNNLGGTEPPKIAFAPEDTEHTGLRAYPVELGRGCPYRCAFCLGGFTAGHMRHRPVEQLLEVLEDVEKSPYDRAAMISPSPTLHPEFEEILEECLERHLEVSLPSTRINDLDPELLPELREAGVRTLTLAPESGSEDVLEFLNKPLHRDHLLELVEDAGRLGMRVKLYFIVGIPGFPPEEDTVASARLARECAELADVRVSVNPLIPKACTPLQYSEMLSAREINRRYRLFEREFRGRVSFEDPELARAQCLLSRGDVDVSRILEEVLWNARSPGAWARAMRSHGVSISPDRPPDGPEDVPYDFVRAGPDHEELYRLFTSLQCAPMK

SEQ ID NO: 1381 - protein, 195 aa, Methanopyrus kandleri
VSPLNRKELLRRVLKEALATGRYMALGSMDGVLASMGAVLSVVARGGSAQDAASAGLSVAVALALSNGFGSYLGEKIEELREIRELERQMIMKRGGLEHTRVHDLARIRIYTSVVSHGGSSFMASMVPILPVLIIKDPKWSVIACTCVSGIFLFLLGVYLGRLCKERKKDLILRGCETAAIGGLVGLVTHFMGAH

SEQ ID NO: 1382 - protein, 96 aa, Methanopyrus kandleri
MAKIRRLVLDVMKPMEPDTTELARSLAKLEGVDGVNIVLVEVDRDVENVKVTVEGPDLDFERIKDLIEDMGGAIHSIDEVVAGSRIVEEVKTPQDD

SEQ ID NO: 1383 - protein, 349 aa, Methanopyrus kandleri
LSTWHPRPGPIPAAMYTLRDLLADAVVLHGPKGCCFRTARLLEKDGVRVFVTGMEEDDFVFGALEKLVELLEYVEERLEPELIGVVGTCVSSIIGEDLEAAVEEADVDATVVTVEVHNGMGPNTEGVIRTLERAAEAGVIPEGEVERQKRLMRAAAELERRRGMASREYLEPWSGHDPSEVARVLLSSEDVLAILNAKKETAYLFADPVLEVGKRGAWVLANLSPESGLPKVRRDAEVIGSIFREEGIEFEVTGSLDEYAVTGELLAEKIEEFDPDSVLITGIPHAVAPEELDVDATFVAVTDGLREASALRELGYDYVVVEEEAHARVLGRREIVPSDLGEAIRQLSA

SEQ ID NO: 1384 - protein, 247 aa, Methanopyrus kandleri
MLPSSPSCRCWLRAPRRPHRVVLPALVSANSVGALTPLGNPQNAIIYSHYRVDPVDFFVTQLPVCAALLAPGLLYAWVRGERVESGSGSAPNVLDVAVVIAAAGCLLAHVPVYFWFPAVFGYYAVLRPHAVREVDWVVIGLLTVGVLVPSVIGSLGWNPRVDDPFVWSVLLSQVVSNVPTTVLVVPMTDDWRDLLHGVTVGGYGTPVASVANLIALRAAGSRGVLRDYAVLQGSCLMLGVLSHYALS

SEQ ID NO: 1385 - protein, 327 aa, Methanopyrus kandleri
LERSLLIKTILGAVAGAIALYLTLFHLADVDEVLRALQRADVAWILAAGACEVLWFAACVEGWKKTFEPLGGRPSRRQLFLMYCVKLMVNNLISLARVLGDAIRVYYGIRLGWSAATVIPTIVADIVLGNAGYLAVILLGCAIVWCCTEVSPYLIAANGVGAVAVAGLWALFASERTCHEAYESVRDLVEALVRRVGYSVGTVDELVDSTVQLFRSKEARLALLQYTVGWAARVLRLYCVTWAVWPTASPLIPLVMSVAIRGSAVVSVSPGGLGIVEGLTTGVLTVLEADPSRVMAALLLDRLYSFVIPVALGAVSVPVLERYVGRG

SEQ ID NO: 1386 - protein, 231 aa, Methanopyrus kandleri
VELYHEVIMLKDIAALADVHVGVEIELRRRGIRAVDRTEDRVEKLRRCLEALDPSILVIVGDLKHNVPFASRIEFRGVPKLVDAALEIVDEVIVVKGNHDGLVEELLRNQRGVRVVGTRGILIDGFYFLHGHAEPDPELLSRSDLLVFGHEHPISDAVPGVSVKVLVELELDFEELTRGEVSGRGPGFVLPAFDDLVGGTEVTSDDRLLLAHRRGAVIDESYLPIPEAEPF

SEQ ID NO: 1387 - protein, 354 aa, Methanopyrus kandleri
LAKVRVGVLGATGIVGQRFISLLADHPWFELEAVTASPRSAGKTYAEAAKWYLEEPMPEDVAELTVLETDPKEVEREADVDLVFSALPSDVARDVEPAFAEAGFAVASNASAYRMEEDVPLVVPEVNPDHLGLIDVQRDERDWDGFIVTNPNCSTIQMVLTLKPLMDEYGIESVVVSTMQAVSGAGYAGVPSMAIIDNVIPYIEGEEEKMETETLKILGELDGDRVEFADVKVSASCHRVPVLDGHTEAIFVATEKEADPEEAAEVLAGFRGVPQEKGLPSAPERPVVVREEEDRPQPRFDRDVDGGMAVVVGRIRKDPVFGGLKYVCVGHNAVRGAAGASVLNAELLVEEGYL

SEQ ID NO: 1388 - protein, 157 aa, Methanopyrus kandleri
LQISVIGSGRASEDVLNLAEELGREIARRGHVLVCGGRGGVMEAACRGAREEGGITVGILPGERRDEANPYVDVVIPTGLGEARNALVVRAGDAVIAVAGGWGTLSEISLAKKMGKPVVGLTSSGGWAEELARRGEIEGAESPEEAVEKAELLAGYR

SEQ ID NO: 1389 - protein, 254 aa, Methanopyrus kandleri
LDEILERVRERVEEIRDRTFTPRAGGRSLRKALSGPGVSVIAEVKPTSPSQGRLRDVDAEDVAERARAYERGGAAGISVLTEPEFFDGRPEYVEVVREAVDVPVLRKDFIIDPVQVEESAHYGADAVLIIAAAVGREAPELIDLAHEHGMEVLLEIDRWEHLELLSECDPDVVGVNNRDLRTLEVDLNRTLELGPEVKDLTNAPLVAESGVSGPEDVVLLGEVADAVLVGTYLMRAPDPSEAVRKLVEAGRSTE

SEQ ID NO: 1390 - protein, 273 aa, Methanopyrus kandleri
VIEPYKLAWSVVFGISRGLYVFAGSFIAAALYRYVAEERITMTTAMFVGLITAGFASGPQKLAALAISQPNVEVLSWTIAALFAIPARTYGDALGKRLLEARLSSMKPTTKVYRLPEDPDNIEDVPGEPPAPREVKKRIAGREYEFPRGTPREDVERVIKRDLEEEGGVGRAVVRVDGDEVKVRLAGAKPPVSHTLPPDKVAVSVKPKGGSAHIGEGDKVIVYADGQKLCEAEVWKRSKSGVVLVVDREHADELMRLVTKGKDVSLVVEPTEE

SEQ ID NO: 1391 - protein, 190 aa, Methanopyrus kandleri
MSANDHPIRRPVAVYGVHGDEGRALEPVVRRVLPEGFRVSRVFENGPYVSTVDPSFHRSEVGARWRRVVEDLRPFDTYVELHCYRPRAYRKLTAERRSGGVPGLVDFGAGVLLGSVPRQHKRILGDVLTLTLEVPRRPSDRALRVVSEILGLIPGRTRGEFVKELRRRFPEATEEALRRFRSYYPDRDPF

SEQ ID NO: 1392 - protein, 406 aa, Methanopyrus kandleri
LRSWFPHAPTVSVPEIEPEEALSYRDEIRTRVRSYAFGLDDWRAKVKTRRAYLRKVRDEDESEILRVYGALLTVAAAGPRPVRHLIAEGESAMAETALYALRHEDESAMSYPEERVLSDLYLWDVRVLERDLGLYAVHFSFPLIHRSPEGQKLKVLVWERASLEKVLKEVRSNRVLGVRVLDPSGWNDVWICPRCGATRRGGTGDLEQDHARRCSNCRGRMRKPDPNLLEMLKEPEGYLIMHFKTLARTFREDVRRLVVSDIESRDDVEDEELREFCLKLFPKVRKRLERVEKGAGGRFPPCIRELLRRAQEGENLPHEARFALAAFLVNVGWDVDRVVEVFSNLPDFDEERTQYQVRHIAGEVGGGTRYLPPNCDKMKAWGLCPGKDCGVKNPLAYYRRPRADDG

SEQ ID NO: 1393 - protein, 128 aa, Methanopyrus kandleri
VSLRCPRCGGPVRPSLDRLECEECEWSKELRSRPRKDTRLKWMKEYARRFLREEFDDCGVSEVIVRGPRGKGAGYLAATVYVDDHHKAIGKDGSRVKEVEEKLETLADELGVPPVRITVHPSSALGRR

SEQ ID NO: 1394 - protein, 192 aa, Methanopyrus kandleri
VIRYIVTVLVVASLLAAPVAAQEGGTTTGTGQATPAVQPSQPAPGGTTTATGGGGHAGVSQPQPVSTAGKAQKVESGKKAGEAKKKKEKRRKKPEKKRTRKAGLQGLTRSLRELRYYALATAVGLAIMAVMMGYGLVKFERRLSQRSMKAKARKAKKTRKPPKVERKLRKTEPKEEEVERVRKLWKQVKEGD

SEQ ID NO: 1395 - protein, 224 aa, Methanopyrus kandleri
LRTVRRALRRGEPVFIFDSEDREGETDMVFWAPEVTPDHVAELRRTAGGLICVVIHPEHAREIRLPFLVDVYERADHPLLRATWPDDIPYDERSTFSITVNHRDTFTGVTDEDRALTVRKLAEFFTRNHEDPVREFGEEFRSPGHVHLLRPFDGLLEERRGHTELTATLLELVGLEPKVAVICEMLEPGGGALPREEAERVARERGAPFLTGEDILKAWKGGER

SEQ ID NO: 1396 - protein, 147 aa, Methanopyrus kandleri
VFTGPIVAVGEYVEGLGEGRRYVSIPYYRREIERVIGARPFPGTFNVRVEREERESLRELASSYGYRIEPHGEYGGAWLYPCLVNGRPAWLVFPDLTEHRDQVELISETELRRELNVIHGDMVKIEVWGPSTWKLARRLTCGPSGGR

SEQ ID NO: 1397 - protein, 291 aa, Methanopyrus kandleri
LEQLGRALLETVQKDDPEPFLRALEETEVDPEDAERFLEALRIQREKGRISDETLEAVEDALFKVSESEEREIPEPDPLAEYAGVDRILGTIMTGKEADVLLAERDGEKVALKVYRAHTGYEERHEERVYRLEDGEVRRIERGDAALREFSRLRRAYEAGVRVPKPYDARPGLIVMEYIPGEPLYRAPDLDDPGSVLEDLLDQVVRLAVDAELVHGDLSAFNVLVGDDGVPYIIDLSEAVKVKEPGAFETLRRDVKNLVSFFERKYGVSADVDEVVERVRRGVYGTDRGRR

SEQ ID NO: 1398 - protein, 394 aa, Methanopyrus kandleri
VRLHVATEDEIRRGETADVYFRRIRKVLEEEGLADTEVVAEISTRSLPEGWEWGVLCGVEEALALLEGRDVTVYAMDEGEVFRPGQPVMRIEGPYVEFCELETALIGCLAKATGIATKAARCKVAAGGKPVYSFGIRRQHPAIAPMVDRAAYVGGCDGVSGIKGAELIGERPVGTMPHAFVLVFGDQRKAWRAFDEHVPEDVPRIALVDTMYDEVEEALMAAEELRERLDGVRLDTPSSRRGDMAEIVREVRWELDLRGYEHVKIMVSGGLDEGEIRRLAEVGADAFGVGTAISDAPAVDFAMDLVEIEGEPRSKRGKLSGAKQVWRCPNCLDDVVLPRGKEPSPCPECGSEREPLLRKFVEEGEVVREPKSPKEARRHVLETVGELEGLDLTE

SEQ ID NO: 1399 - protein, 121 aa, Methanopyrus kandleri
MSRKALMPCTGMSPNGFVSRVVVAELSEEEGIPSICPPATAAGKEKFLELLKRVEVLAVAGCDYNCPARILREKAGKEPSETVFVSDVSEETGVDADSLYELTEANRELVKEVKRRVKELL

SEQ ID NO: 1400 - protein, 248 aa, Methanopyrus kandleri
VRAVFYLLPLYIKSDDAWELGRLLRALDTRNRRVLVLDRARSFVHNLHQALRDAERIRSVEDLQQFAGQGGGIGVAEIIKGLVGADVHGLEAMVVCRTYLSNYAAQRSIIVPIMLHKIRLEPKDVFDDNPLDALRLEALESVLYDLAIVAGRAVRSEGDEYPFTVLLGAGTVVRVAQNYPDHAMEIYENFVETFKDELDPEVRVYDLGSKSEVPLEELEDVEVKKFEELSEDERKELVNWMNGQIAVR

SEQ ID NO: 1401 - protein, 422 aa, Methanopyrus kandleri
LSCGEDKEVLFEALDAVEEKYDLRKSQYEMLEEIRDQLAECDSVAVLTTRPGSGKTWLLRRIAREYRERVFYSVPSPDLAEREYKKFKEWELSVDLWRRVEDYDEPCQVKLPELLGELEQEELFEVMAHAGSAQDEPKCYPWFYRKEGPLLKPLEDEELREKVRRALYRENPFIKGFAPWDSCGNCEIIRQLREPARIVCLSFKKLLSAPFLYASHRCAREALGKEPFVSEEDWEEALEGSLVVLDDAHVLPGALIVEIRGYVRVGSRTLMDELKDLALDQSHMWSVVDWNRDVRKVKKALEEKTKFREVYDRLTYELEDWIEELRELVERECRADYLDAKKNLSLLNELIERSEEAGIREWVVVKSPRRGRPILTFAPVVKNLEQLLKLLMGPEYFELPVAYLVAENRPTLSELDRRGVGV

SEQ ID NO: 1402 - protein, 358 aa, Methanopyrus kandleri
VERLEGGGVSVVNVVVCGHFNHGKTTLVKALTGEWLDRLPHEREMGVTIEPARAFLELGDTTVSFVDVPGHRDYIRNMLASAWSADYAILVVAADEGPCPGTIDHALVVSFYGARVLPVVSKVDLVSRDRAAEVADEVMDLLELLGVEAVVEPVPVSAKTGEGAEELLDALAELEEPPRPSEMDPLRAPVESTRRVDETTVDVFGIVDRGTLEEGRVEVQPGGRSAEVLEVESTDGSGPGVPFRARLRVKGSITRGMCLGEGLSTADRIEAEVLSIGAKVRPGTMGKVHVLSAAANVRFAEVETDAGTEVLRPYAEGHNVAHVVLELDREVVVEPGDRFLVTVGNEPAVLGVVEGVAR

SEQ ID NO: 1403 - protein, 1942 aa, Methanopyrus kandleri
VPRPLLVLSLLLPALTSFAPVSCGEIVVISRYAGQFIEPLSKSGVDFFVIDSRSYDSLIVGANLEEVRKETCERIRNASAVVLYRSSGLTSLDPYSAPEYAALAEALSRGVPFYVYQNGINIPTGSTKAEMVPLADRVMNVGGAEVPLYLFLTTLSERNLVQFFRYVGGGEPPRAFYLDGLLSLYDPLTDTVVSYDRPVDPIVILRYQREFPHGEVLSSYHGITVYPRWFVELIRGEVLPRLREIFDRYRRLGESRGFYTPGAPTVFIVFDSSNLLGRYLGYLDWLRVLAEKLHERGYNVVPIALHYDALYMLPEDFLGALEPLVKEEHTVCIMWAVNHSMMRYYGPDSRLVRLFERLNVPVIGLDSNHMGMTRLQWECLYMSERAADHYMVFNVIAPENLGFLGLFLVGTSRVVRLPPGLARHVPGGVLVVRGKPIEETIDAVVRLVEKLRRLREAPNREKRVALVYGVDTSGRDFVAVADQLDVPASVLHLLAWLREDGYSVHTPWDEVLRRVIELDREAWELLERGNFRQAIEIFREALNVLLELSDRFWREYLFRAYHVGPYVRTPPLKTGLNRFVERAGGRAHEVELLLLDKVTLDEYLEWYRSLPEPTRLYVERGILGYLRYLVERANPEELPPDKRYLEFLRVRMEALMDTVISCLHLMNLDDATREALVRKLREVFARVTDLLVRVSRGERVDKEPVLRELDGLWEEWRGRLDELGGLFGWGPPEESPFLRTVDGTRAFPIPGMKFGNVIVLPEPPLLRMKSETELRASVLPPTHLYLAFWYYLTRKFDADAVVRVGGRGRLEWTPMKPILPLGWEFPIVLANGTPIVCLYHVGDPTGCVTARRRLGAIVLGHFPAPRNEVQFDPEVERLIEALEKYLQSRSPALRDAILELVRETGVYLVVTDEWEKFERNFDRCAELLYEYLREVEEESGMCGLHVYGLPSIDPEDPFKSLECMVEFALRRALWEEVDVDWEAVWTGRQGDRISRLAREVLERFLLSARYEIENLLRALRAEYVRPGFGGSPLRYVYVAPTGRNTCAYDVRRFPDEVAVSVSSVIATELYRHAEDRVMTVMGPTDLATGGLQYALALELLGYVPVKTSFRSYVPTTTGRASYGTNLTGEVIGVLPWELPLVHVRHPNVPVQTLLIRGRITEVRYLGNRPTVVVDDGTAHVEVVLPEGTRVSVGQELVVLGIPDFEAENVRLLCSDLVISYSEEDVVDVADLVAMPTVCGGTSACVSGIVARILDDHTVVLRSEYDPSASITVAFRYPVNLRVGERVVVVGELTFDLRTVRIVGVEVLDLPRVRKDVLLLVSGATFQGISPSALSLINVCRMLDVVAAEPWIALALGERSYLSPTARPHGTGRWDALRDVLEALKRSLKEAEERLRDQGCVPGVLRRLLDDALTRLERDPLGTLRELHEGLKELNDYVVVGLRDLVGWNLAELLWSVAVGTGLWIPPSRNAPFLHWAVTYLVLREALEERLPDWLLGGLTRENVAVMAGVAVFTQCPGEFIAPVLPMIEAGMYTGDSVESLGLRALVGFSYTVLPYVRSELVGTRQPFLHCPLALALAVVTSDAVLQVFDSYDDYSNLFCCGCTVDLEASARALLDYLLRENSIRGWTLDVSKVDLGAFKPGWNVAKSAGRLARLVGWKETLLRAASGLKETLREIERGSGPLVSTRAYLVRSLLRTLYNRSFIAGLRRFGVSGALYLLRSLKRFATLGYVAIGRRDLAAVLPAVWSAVGANADWLASVPTALASAAFSLARISTDLGVPYPREVLSWITSVACCCPELCAFQTQVVERMATEAIETATAVPPTVPTARPTFGPTVRVAPRVPAVARITVTVSHVAAVTGAVVGPRSAKPTGVSLIGVAGKVTGGAEKDAGSTAARTGRVLAQEYRAAPVSYFPRWLLVLALLTGCFLAVWWARRYEPGPRGW

SEQ ID NO: 1404 - protein, 458 aa, Methanopyrus kandleri
MGILRPLVLALVTVALSTAPGSAITAEQIQECARAAHDWLKSQQYTEEDVGKVIEYKDRSGQKATYEVKPEDVGAFPMSYKSDVTYYCLPNLHTYVVMDTLLTAVEVGYPVDKDMVLKALQYMWNVKGKYQRKEDPNGEWAYWARIKDGKEIPSAGLTAKFALPFFRARQAGIVPDDKWNEYKPFLEKVINWLREGPNLQKEDKGYCWIDYPDRPGGAHGITDVTSYCLRMLLAAGTSPDDELILKVVEWFLNNQDEKGNFYTDPRDTGCPYPLYTTGHCRAMIALCDWLEAVQRAGKEDELKDLVERVKNALKKAIDYLLSLRDPETGMWGRGSLSEYPPDYGSTASALVALLRCAKLGLIDPNHEAIVKALEVLHGQYLEAKRLRLPFYWYFIRSVWSPELRYRSQTLATSYALAAFALAEKLGVGKGVVKKRKIFPVTPAVVALALAASLLTRRR

SEQ ID NO: 1405 - protein, 333 aa, Methanopyrus kandleri
LSGGRRLDPLGAFVGLLTEISPYLLIGLVLGAALQSMVPERYLARHLRGGLKACIIATLLGVPLPLCSCSVLPLAIAAKNRGAGVGPVIAFIVATPQTDVNSLLLAYALLGPYFTAAKVLTAVVAAVIVGYLAELTLKDRSEETEELPSCGEHGPCYRGRSFKDFPRELLELSGTVGPWLLIGLAASVLLELWVPSPAVRYLEGFLGPVLAALISLPLYVCSVAAIPIAAALVAKGASVGSMLTFTVAGPGTNVATLSVILRFLGGRIVAAYLVGITLCAVAAGYAADTIGVPVVSTGIFEASCHPSLGAVSAAILLLLMTAGIIWRLVRDRT

SEQ ID NO: 1406 - protein, 402 aa, Methanopyrus kandleri
MRPKQVWVSVAFEGEWNEKKPYVTESIEAGVDVIVCLPEDVERVKELGNVKVAVPLMPESPGSPDLALEELDAIDADVVIVGKGGEGDGSIDLPDDISESIDAALIEKARDRGFEVAEYVEILDKPYERFAAEIAKNVGPDYVIAIGRDWKIIPLENLIAELQGEKTQLIAGARDAEEARIAFETLEVGSDGVLLDAERIDPSEIKKTAEIAERAAAERFELVAVEVKEVKPIGKGDRVCVDTCSLMSEGEGMLVGSTSRGMFLIHSESLENPYVEPRPFRVNAGPVHAYIRVPGGKTKYLAELRPGDEVLIVDTEGRTRAAVVGRLKIERRPLMLIRAEYEGVEIQTIVQNAETIHLVREDGEPVSVVDLKPGDKVLAYVETEEGKGRHFGMEVEETIVEK

SEQ ID NO: 1407 - protein, 270 aa, Methanopyrus kandleri
LVHIGKQIRMERIMNRETGRTLIVPMDHGVTLGPITGLEDLEETVDAVARGGANAVLLHKGMVRAGHRGYGRDVGLIIHLSASTELGPDPNNKVLVSRVEEAIRLGADAVSVHVNVGAEDEPQMLKKLGEIAARCSDWGMPLVAMMYPRGPKVEDEFDVEYVKHAARVGAELGADIVKTNYTGDPDSFREVVKGCPVPVVIAGGPKAETPKEVLEMVKGAIEAGAAGAAIGRNIFAHKSPRMREAMTRAIARIIHEDAEVEEAMKELERV

SEQ ID NO: 1408 - protein, 105 aa, Methanopyrus kandleri
VLRSLREALETLRRHVQVLEVVAEHQPIGIGRISDVTGMEWHKVRYSLRVLEEGGIIRPSKKGAVLTEDAPARISKISRRLSELNREFEDISKRYQSLARKLEEG

SEQ ID NO: 1409 - protein, 325 aa, Methanopyrus kandleri
MLFLSEDHVRALLDVREVVERVEETFRIKPECEMPPKTIVPLEGGDFRVMPAYLSELGVAGVKIVNSHPDNPDRGLPTVMAVMCLIEPETGRPLCLVSATEITSLRTGAAGAVASKYLAEDVRTVGIVGAGVQGRYQLLTHAEVFDLEAVFVYDQAREAARRLAEWVERDLGVDAKVLDNLDFSGLDVDVVCTCTPATEPYLGSEDVPEDVHVNAIGADAPEKQEVKTELLKRAVVVVDDREQCVESGDVSQPVERGELNPEELIELSDVVRGETEVDSSELTVFDSTGIAILDVAVGALAYERAKKTDAGVEVKPFELPTGNFK

SEQ ID NO: 1410 - protein, 283 aa, Methanopyrus kandleri
  MISC_FEATURE (179)..(179)
  MISC_FEATURE (179)..(179): selencysteine
VRGGLREFLYDIDQRRWLRAVRDHVVVCGFGRVGAQAAGRLRAHGFDVVVVDTSKERVERARREGSVFPTVEGNLTDRRTLERAGVDRARFVVVCTDSDETNVYVTLLVRKLNPDARVIAVARDPENADLLPHAGADEVVDAYRVAGEEAVERVLAEHSFTVTVRHDLDEVEKEWRTIXVENGGTILDVRFHVPESPEEPIVKELPVESPEDLQRRKELLGTSEEFRSMAEALHELCRGAHSHRVFVADPSDKERIVKELEKLGFLIGVDLSHEEVLDRTFRN

SEQ ID NO: 1411 - protein, 169 aa, Methanopyrus kandleri
LDPVFHVAASYALARAAGYPVRTSLMYAFGINVAIDLDHLLRYRWILHSPVALLAGVATAYAAGLRTGLVLALYTFHLLCDALAGMKGAGTGVPAMFPFSLKSYGLEAYVLLGPKGISWSLAPIARSSEAGPAGFLVSGVGLATTLGVVIFELLGVFKKRRELALAPPV

SEQ ID NO: 1412 - protein, 494 aa, Methanopyrus kandleri
LSAIMFVGTASNSGKSFLAAVTCAYLRQRGVDVAPFKSQNMSLNSCVAKENGEIAVAQAFQAAMAGQEPSIHHNPVLLKPKGELRSEVIVHGKPIGTMSYREYREIVFEDPWQAVLESAEILSEEHEVIVAEGAGSPAEINVLDTDIANLRVAEALGADVILVADISRGGAFAAVYGTIELLPERWRRLIKGFLFNKFLGDESLLEPGIKELERRLGVRYLGTVRHVGDFWMPWEDSEALDTHSPGRGSVRIAVIRLPRISNFTDFEPLAMEPDVRVEFVDPRDNLPEDADAVILPGTRTTISDLEELRKRGMDEEVVQAADEGTVVLGVCGGYQMLGRELVDESGGELDPGESVPGLGLLDAVTVFPSDAGKVTVRSEGVVNHPHLRGIRVEGFEIHEGRTYTDEPHLVRLRSGYGNRGCFLDGAYRTDRPVLGTYLHGIFFNRRFRHEFLRWVSGGRWKPPERDVVREAVKRNLQVALEIVESTDLPELLGE

SEQ ID NO: 1413 - protein, 193 aa, Methanopyrus kandleri
VDLDRLKVSSFERVTRPIEPKDSGLITERLGLLPGHRVFESGVGSGFLTASMARIVYPEGEVVGIEIDTRKLEKARENLEQLGKVYEKSVTLKHGDAREYLEGLEDEFDAMVLDLPEPDRVLEVGLDALKSNGKVAVFCPFFEQVRAVWQVLEDRCTWLEAVELIERKLQVEKRGIRPGRTLGHTGFIVFGRV

SEQ ID NO: 1414 - protein, 266 aa, Methanopyrus kandleri
LKRIAVYGKGGIGKSTIAANVAAALAEEGYRVMLVGCDPKADSTLTLAGRRIPTVMHEYRRKGEGLKLEDIIVEGDFGVLCVESGGPKPGVGCAGRGVLKALEMLTRMGAFEDVDVVIFDVLGDVVCGGFALPIRRGYADTVFVVTSSEPMSLYAANNICRGIAEYADRGGAKLGGVIHNRRSRDSDSRVVTEFCRRIRAELIYDLFYMEEVRKAESRYRTVIREFPDSDAAEAFRELAHRMLETEGVVPQPLEEEEVLRLAGVRF

SEQ ID NO: 1415 - protein, 270 aa, Methanopyrus kandleri
VRFVRKEITVVVVIAVIVLPAAGYYEVNYGRGSVERPVVTYGETTWRTELPTAVELFKEVGVDPTRFHRTIVTAEETNRVAAEVTGRRYTPSQIYSCATVTPYDEPPRRYQEVEGYRIYVGPEITVCKPETYAEALASIGAPPCCVTIRSPVRATGEAALAGVYKAMREAGVEITDRDARFSQAVLEAVKGAGDDPRRRAAAVTVVVVCVFRGADDPQKARDVQDEVENVYGVNLPPETAVHAAQAAKLAEEGAEYSWWWLFKRLLAYWI

SEQ ID NO: 1416 - protein, 284 aa, Methanopyrus kandleri
MAKYEPVIPELEVNPEGEVSKIAEFLRGKFEEAGREIAVVGLSGGVDSSTTLGLAVEALGRENVVALILPERDTPEEDVEDAVEAAERFGVEYHVHDITEVLRAFGTGSYVPCHPFSRKSDANLKPRVRMCVLYYFANELDGLVLGTGNRTEWLTGYFTLHGDGACDVAPIRHLYKTQVYVIAEHLGVPERIVEEKEPSARLWPGQTDEGELGIDYPTLDALLYALVDEGLGPRKAVDWLGERGVEATEEDAEKVLDLVRSSSFKRRPAPGLDLPEPEDPAMSG

SEQ ID NO: 1417 - protein, 123 aa, Methanopyrus kandleri
MEKVVLEFGCEFGARLWVIQQVICILVSSLVIPILAHHTVRAVRRHDLDCALASFGMLLLILAAGVITPLNTLLHLYSPPRIKWGIILWTYIGSLGAGMVTFGMGMFKVLTRRPAAPFGGERS

SEQ ID NO: 1418 - protein, 246 aa, Methanopyrus kandleri
LIGALLASHSYPTAVTWDILAEIAEILPSSITISCTDPDIWEFCIELRDHVEFLDVEEVDSLDPTTVVALAEEEAHMGPKVLRTRVRGVVIVTDDPERAAEDWRLPAVSAREIYVPVVRVGGNATVHVYRHGEVLWRLGLREGKTLLPPDYKSLRELLWNEFPYVRTIGSLAQRTNWHEVLVRLALIEEWIKGNKLVSEFLDWIPKSTKVIPRSTDSPTDSSSGENLLEGRLILIPAFSSTLSALA

SEQ ID NO: 1419 - protein, 345 aa, Methanopyrus kandleri
LFKSRRLPSFLIEGKVDEELEDFTDDFGQPDLDAIVRACVDRLDPHPDLEERVLKTARKACERIGFPMGEHAEFDLYPWLAPQIFHERVVRDVYSGESREPGEARVAFVSVHHDKRGVAEYVYRTLERLEPEAVCLETSPAGLETAFHYTLSPLPHAGIEVMARVPTKMLMGPFRDLYGALVYCLREGVPAIPVDVPSSLKLKESRKNPECLRDPIVFEYTSEVERVLGPTGELFFREYEEVEPVLRRLGGEIRTNVSLVASETFVRFHLEFRERYMLSRIADVTEDFDRVAVVVGAVHTSAMERAWREGEFRYLEPSPEDFKGVEWELSPRYKRHKLVVGGRRR

SEQ ID NO: 1420 - protein, 275 aa, Methanopyrus kandleri
VIGVVVLGATGRMGRRICRMVIEDEELELVGAIASPTSKHLGRDVGLVIGVGETGVEIAPPTALPNIAKDADVAIDFTVREATLENAPKAARAGLDLVIGTTGFSDEDLRVLEHEIEEAGVSAVISPNMSLGVNLLFELTRQLARVLGDNGFDFEIVEIHHRHKVDAPSGTALELAAIIEEELGKGEKVFGREGNVGPRDDDEIGVLAVRGGEVVGDHTVMALGEYERIELTHRALSRDAFAKGALVAAKFVVEAPPGIYSMRDVLFGGKRGEGL

SEQ ID NO: 1421 - protein, 289 aa, Methanopyrus kandleri
MRRVLVVLSIALMALAAPGLAEDKAVTATTEQQSQQAQTAEQQTEQQATAPAPKTVTLKLTPSLQADFTVDLKNGEAVLTLTGGYSLVTEGQDLLSDVLTAALAGAINTIVAPIDGKELLPGVKLEAGVEAPTVTAGLGEDCGVTLTATVLKVEVPKLEDLEHEWSETVTEDPLKSGISVALRLLHTAEEPFIKATLDLLTGALKVVVHLFELEVGSPSEDYEGPYLELTPVNVSEKLNDNATVTAYLGASLSASTLKLSPTITYETTTPLKLPVTLPEITLYTFQLPA

SEQ ID NO: 1422 - protein, 914 aa, Methanopyrus kandleri
VPGEAPVEDYDPKEIEPKWRERWLEERKYRFEGGEDRPAFVIDTPPPYPTGELHMGHVLNWTYMDVVARYKRMCGYDVFFPQGWDCHGLPTEVKVEEIHGITKRDAPRREFRKLCEELTLENIRKMREQLIQLGCSIDWWTDCIDYENEELKELGSYVTMDPDYIRRSQYGFLELLEKGYAYREEHPVNWCPRCETAIAFAEVEYVTRETYLNYIEFPVADGDGSVTIATTRPELLPACVAVAVHPDDDRYSDLVGKKLVVPLHERFGDRDTPWEVPVIADEEVDPEFGTGIVMICTFGDKQDVAWVKRHDLPIVRAIDEQGKMTEVAGEFAGMEVEEARAAIVEALKEEGYLVKREKITQNVGVCWRCKTPIEILVKEQWFVKVRELAEDVKEAARKMVWIPEHMRKRLEDWTESMDWDWCISRQRIFATPIPVWYCKECGEVIPAEKDQLPVDPTRDDPPVDECPKCGCSEFEPETDVMDTWMDSSITPLVITGWPDEEPDLPVDLRPQGHDIIRTWLYYTTVRALVHADTEPFKEILINGMVFGEDGYKMSKSRGNVVEPTEVIEEYGADALRYWAVSSGAPGSDVQYMTKTIKRGYRFAKKIWNVCRLAKDHIDDAPSVEEVEGDLTPADRWILSKFHRLVDEVTEHLESGYRFNDAIKAIEEFAWEELADDYLEMAKLRLYRPEELGEGSREAARAVLRHVLDGLLRLLAPFMPFVTEELYYRLFDESVHDQAWPEASEKWIDEGVEEVGEILREIVTEVRKAKTDAGLRMGAEFEGLTVHVQDEELAESLEKAIPDLKSATRAKEVEVEVGEPKLERVPVKVEPRMDVIGPKYRELTRDIIEYVENNPDEVASAIKEDGKAKLEIDGEKVVLDEECVDVEWELRVKGGEGKAVEIRPGVVVEIRGLST

SEQ ID NO: 1423 - protein, 241 aa, Methanopyrus kandleri
VTVLNSHVVHSPTSRTFLLFLAAWLLLSFLMMFLYFVSIPGFFHALGLEPRTALLLSLLSIVGSAVNVPIKRIRKLVTVQHETYGFWGISYQVPVRRSEEIVIAVNVGGCLIPVAVSVYLIATNLDLWLQYLLATAVTTIVSYATARVIPGVGIAVPFFLPAAVAGTVALLTTKGGAASVAYVAGTLGTLIGADLLNLRKAVNWGSAPVLSIGGAGTFDAVFVTGLTAVWIAYVLSPGAGT

SEQ ID NO: 1424 - protein, 391 aa, Methanopyrus kandleri
VDRVRPLAGGRNVRIREAVLNIDPYVPGKSKEEIAREYGIEPDEIVKLGSNENPLGPSPKAVKAAKRELERLHEYPEPLAPPSLYEAIIDYLADPPYPAGEPVEITREHLVVGGDGADEIIDVLTRVLVDPGDPVVIPVPTFSQYGISARACGAEVRKPRFDPERGFELDEDSLFEALDREVRLVYLCTPNNPTGNRIRERVVRDVVEECRGVVLIDHAYVEFADHDYTPLALEYDNVLVLRTCSKALGLAGARVGYGIANPELIEHLHRIKPVFSLTRPSAAAAEATFRDRDYIEKSVRLMIESRKYLYRELRKLDRLTPFPSEANYLLVDVSNTGMNASEFTEELLKRGVIVRDCSSFEGIEPFYVRVSTGTLEEDRKFIEVVKDVLEV

SEQ ID NO: 1425 - protein, 279 aa, Methanopyrus kandleri
VTRLSLPTSRHCEGCPGAEGEGPHHPTLELTTSCPYKCPHCYARYAENVGVVVKPGLYGEPQGCLTVSQYGEPTVLGRELIDVLEMVRETGLFDRIDLQTRGYRPDLAPKLSEICDLVMVSIDVTDPDVHRRLHGVGPERTLRFAVNTDRPVIRSLYLPGINDDLPQGLADTEIEPAEVFVQPLIPFGKAVENLKRIGLRDHYNVVGSLLNWAEKFEEFGFDVRFPACWVDSLERLKERMEEELGFVDLRNVRYSPDPGTPAPERRFTPLRELLDELVR

SEQ ID NO: 1426 - protein, 212 aa, Methanopyrus kandleri
VQVVGVGPNPTRFLTIEAIERIARADLLISSESILREIDGLRVEAEIDLSDKEVVTWNGSVRETLTEYADSDPVVVARGDPTYMGVGRLASLLFDDVEIVPGVSSLQALTARFGRGFHEVEAHVNLHSEEDVEKVVESLGAGRTTAVLFGKVRPAKVVETIESVGLNVKVIAGERLWYPDERLATELHSLRNFSEFTVAIFEPDHVIETSLR

SEQ ID NO: 1427 - protein, 509 aa, Methanopyrus kandleri
VRGEETLAEVVLTMDRTLASNYRGGMFMGFSACVPKGIIPDWLYFSVFCPSVEYDEETGEVKEAPLGIRRIEAQLRREGYDVAVVHPDAVHKAIDEDTIAVGVSEIDPQGMGPATTTFTSFSGKPAYMKVCFEDLMERIRELKDRYGFGVFMGGPGAWQVAETFPRFGVDFLIMGEGEYVVGEVVRRIEEGDRGLEIVRGKPVAAEDIPTIVNPTTNGIVEVARGCGRGCKFCSPDMRELRSFPLSKILEDVDVNVRGGHEEILLHAEDVLRYKADGWRPNVEAVLELFSAVMNRPGVKRVSVSHVALSTVCQFDERLGEISEVAGVGELVPWMGAQVGVETGSPRLMAEHMPGKVAPYKVEEWPDVVEQAFGIMNDHGWVPCGTLILGLPGETEDDVMMTVELLDRLRDYKSFIVPLFFVPIGESRLSDHDFFTPEKLTEVHWEVILKCVDHDLKWLPELYEEYARANGHGPLVKLTIRALTWYGRRKIFKSALKWCPEKELVEAVLG

SEQ ID NO: 1428 - protein, 105 aa, Methanopyrus kandleri
MECRVKVFLCADGRPVMGPGRYALLKAISEEGTVKGAAERLGWSYGYARRSIEALERAFGRKVVQTERGGPEGGRASLTDFGRKLVEEYERAMKEVREKGLKPIL

SEQ ID NO: 1429 - protein, 270 aa, Methanopyrus kandleri
LNAKIVHISDLHISPYRKSWSPEVFYRGIEQINDLRPDVVIVTGDLTDNGLVREYEEVSSLLEKIEAPVVPVPGNHDARNLGWMTFEDVFGDRYRVERVSADLYVVGLDSSEPDVDYGQLGRERQEWLEETLRRIPGGACKCIAMHHHLLPVPGAGRERNVLVDAGEMINLCIKYGVDLVLCGHRHVPFAAKVEDTVVVNAGTFSATKLRGYSRNSFNVIEFSESTVSVNLYEITTERKLELARYKPVVREGEYRLVRVKGIADILRESA

SEQ ID NO: 1430 - protein, 174 aa, Methanopyrus kandleri
MNVVKEGWPDAPSHVCRGGPPEALAFCCPPVKPCPIFHALDEAGLDPEEYVRRKKEFAEKTPLGSGKNTCFGSLVWCCKITKPCPLRDSTLQRIGMSPEEYMWWKKKLAEYLLGKKDLDEILRETSESEPEEETVEVVAEAAGVSEEEARRALEEANGDPVRAVKLLKSRGKGD

SEQ ID NO: 1431 - protein, 532 aa, Methanopyrus kandleri
VSWVIRVEDLVKEFEDFRLEIPELEIGEGEVLGVLGESGAGKSVFIHVLKGLDDYEPDEGRILYRVGMCPECGWIERPEFIGEQCPKCEKGKLEEEVVDLWGLSDTERRRFRKRIAIMFQRTFALYEEQTVLENVMEALEEAGYSGEEAVQRAVDLIEMVQLEHRITHLARDLSGGEKQRVVLIRQLAKKPIVFLADEPTGTLDPETADIVHKALREGVKEEGITMVITSHWPEVIEDISDKAVWLEDGCVKEVGEPSEVVSKYLELVEEVEREEVEVGDDIIRVKDVKKYYYSIERGVVKAVDGVSLDVKEAEVYGIVGKSGAGKTTLAKILAGVLEPTEGEVYVRVGDDWVDMTDRRERGRAKRYIGMLHQQYTLYPHRTVLENLTKAIGIELPDELARMKAVHVLKVVGFDEKKAVNILDKYPDQLSEGERHRVALAQVLIREPRILILDEPTGTMDPITMRKVAKSILNARKEMNQTFVIVSHDMDFVLMVCDRASLMRDGKFVKTGDPEEIVRELTPEEREEMIRQE

SEQ ID NO: 1432 - protein, 234 aa, Methanopyrus kandleri
LKPIRVCPECGKYTEKHTCERCGRRTEEFLDGRRRLALSKLLSGILRHFPEEVKVKLDDEGFTDCDVHELAERIKKYWKNREYYRWLTGEHIIAVVETCPKGRFEIDEHGRIRARYGHSRRLSVRPTLPEAENVKELYHGTARENLESILQHGIKPMGRRAVHLTDDEREALITALRHTRNPVILVVDAERLRRHGLVPRKAGKNVYVVEGTVPPDCITRVIRNPRRSVESEKR

SEQ ID NO: 1433 - protein, 229 aa, Methanopyrus kandleri
VKSAEWFEASTEEERVEIQRKVARKVRLEPLDDVDAVAGVDVSYRGEEYRAAAVVLDPETYEVLDRRVVHGTTDVPYEPGFLAFREGPPALEALEGLDFDLLFVHGHGVAHPRRAGLASHLGVALDVPTIGVARRPLVGRSKEEPSRIGDTTPLVHRGEVVGYLVRTDAEARPVVVSPGHRCNLEDAVRWTLRLVRVGKWPEPLRLADLLSRRGASRVEGESRGAGVRR

SEQ ID NO: 1434 - protein, 984 aa, Methanopyrus kandleri
VALVYDAEFVGSEREFEEERETFLKGVKAYDGVLATRYLMERSSSAKNDEELLELHQNFILLTGSYACSIDPTEDRYQNVIVRGVNFDERVQRLSTGGSPARYAIVYRRGWRAIAKALDIDEEDVPAIEVRAVKRNPLQPALYRILVRYGRVDLMPVTVDEVPPEMAGEFERLIERYDVPIDEKEERILEILRENPWTPHDEIARRLGLSVSEVEGEKDPESSGIYSLWSRVVVNIEYDERTAKRHVKRRDRLLEELYEHLEELSERYLRHPLTRRWIVEHKRDIMRRYLEQRIVECALKLQDRYGIREDVALCLARAFDGSISMIATTPYRTLKDVCPDLTLEEAKSVNRTLATLIDEHGLSPDAADELIEHFESIAGILATDLEEIERMYEEGRLSEEAYRAAVEIQLAELTKKEGVGRKTAERLLRAFGNPERVKQLAREFEIEKLASVEGVGERVLRSLVPGYASLISIRGIDRERAERLLKKYGGYSKVREAGVEELREDGLTDAQIRELKGLKTLESIVGDLEKADELKRKYGSASAVRRLPVEELRELGFSDDEIAEIKGIPKKLREAFDLETAAELYERYGSLKEIGRRLSYDDLLELGATPKAAAEIKGPEFKFLLNIEGVGPKLAERILEAVDYDLERLASLNPEELAEKVEGLGEELAERVVYAARERVESRRKSGRQERSEEEWKEWLERKVGEGRARRLIEYFGSAGEVGKLVENAEVSKLLEVPGIGDEAVARLVPGYKTLRDAGLTPAEAERVLKRYGSVSKVQEGATPDELRELGLGDAKIARILGLRSLVNKRLDVDTAYELKRRYGSVSAVRKAPVKELRELGLSDRKIARIKGIPETMLQVRGMSVEKAERLLERFDTWTKVKEAPVSELVRVPGVGLSLVKEIKAQVDPAWKALLDVKGVSPELADRLVEELGSPYRVLTAKKSDLMRVERVGPKLAERIRAAGKRYVEERRSRRERIRRKLRG

SEQ ID NO: 1435 - protein, 394 aa, Methanopyrus kandleri
LGLDEIVNGFPLKEEWVYLDNAATSLKHERVISAMERVLREFGVNVGRGAHPPGECATEEFERARDIVASFLGVEPECLAFTLNTTHSIHYVLASIRWKKGDAVVTTALEHHSNLAPWLRFSEVLGFEVEVVGFDRETGEVDMAELESVVDDNTRLIAITHESNALGSLQPVDEILELAEEVGAYVLLDAAQSLGHMDHDWSRYHFLAAPGHKGLLGPHGTGILYVREDVMEELELRLLGGGSTDYVTRDLEVVPREPPLSFESGTPNLPGVIGLAEGVKILEEVGLNRVERRIRKVTRRILNGLEELEGVEILAPEAERKTIVPFLVDGVDYAEVGKKLGERNICVRTGRHCASLVFERLGLDGCVRASVAFYNDIEEAERFLEVVEEIARGS

SEQ ID NO: 1436 - protein, 263 aa, Methanopyrus kandleri
MGGSERSVPVLLPFLEDPLTMFPSRVIIPSTRYIMEVVRDLRAPWRGEVLDAGAGCGSFALTVAALGPYTVYAVEPDPEHSAALSANVSANRDVLLGDVLPLECSIEDFRRPVDEVLTDPPWGLRSGISRTPDLEFVLSFLDACVDVLRPKTGRLVTRCPPEFIDDIVDHMSERGYLLDRVKRRHKAAVLVLRSEDHRDYYDDRESAVAAAGGQVLVAWEGGELDPEADRYSLVTPYESGWHVWEVPNTGRIREFLRGFLKGG

SEQ ID NO: 1437 - protein, 821 aa, Methanopyrus kandleri
VSELFERGHWSYWCPVWYCGFPFLLYYPPLFYLVGGALNLPLGDPVQTLRILGLTAVYLLVVGIFFACRQLGFTTFEAALSTLLFLTSPSILWEINRGGIFPMMMSLGFGLLALGLLERTLSRGFTPKSALGVIALITLSLFTHPIGGMTCQGALILRVLLEVVPEGSLRPNQWFRALTDRQNLPLLLPAALPLLLAAPQYLPMLLYRGYISPLVTPAPQTPLDCIVTLLSCPMWSPLPFFILLSVLGAYYALRRSGPGIRLYGALTCLIFCASVFSLLAFWSIYKVAPGGQLITHRLPGVLFPLFGALILGCVIRHRPKVFATLAIPQLLLFAVYVWSYTQPVDLDSVREGHIPSPVVHLWKAMDLLPRCVGAGLTSPQSLLWTLVAAGGFFTLDTKPTEDAKCALHYLRHQGGPYDRVTFDPFTHVPLYRCDSAFVPIESGHYSLLGWFNQGDPAFYSLAWYVEWQHSWVFYPNAVLTVFHLANVRYVISGSPKWTASLERLPEFHRLTDFGRYTVFSTSVSPGPAELVPRPILVIDDILRRPNPYYTMVLNIIPDGGTRRIFVEGSPEDVARFRQIIVRTDRPDTLDEVLRKMKSGRVLVIVPANDYATARYLAERFGLHVRPVIVCPWEPLPSMKVCNRLIDAYRFVGITVPGATPEERTWFLFNGRPWVDVKLGKVEVRVCGVDFVDLAGTLHQTLYYGAGAYPLPPKWERALLNEVLRGFDSGKPRPVKFKAVEPDDVRVRGKGYILVKIGYHPAWHANAPTYRGSGGLIIVRSTGVTRLRFGFTWWERMLWWGAFAIGLMGSTWLYLRGRDEGR

SEQ ID NO: 1438 - protein, 418 aa, Methanopyrus kandleri
VGKTMAEKILSRASGEDAEAGDIVVANIDVAMVHDITGPITVQRLEEMGVERVWDPSKIVVLFDHQVPADSVEAAENHKIMREFVEEQGIEHFYDVREGVCHQVLPEKGHVRPGDVIVGADSHTCTHGALGAFATGIGSTDMAAVFATGKLWFRVPETYRVEITGELPEGVYAKDVVLKVTGEIGADGATYMAIEYHGEVVREMSVSDRMCLCNMAIEMGAKTGMVPPDEKTLEYVKKRAGTEGRPVEPDPDARYEAELTLDVSDLEPQVAKPFSPDNVVPVGEVEGIAIDQVFIGSCTNGRYEDLKVAAEVLEGEEVHDDVRLIVIPASREVYHRTLKDGVLEVLHEAGALICPPNCGPCLGGHMGVLAEGERCVATSNRNFPGRMGHRESEVYLASPATAAASAIEGEITDPRPYL

SEQ ID NO: 1439 - protein, 432 aa, Methanopyrus kandleri
VPRSRGAILTSDIDRLVEKLAEEVGKREEEVRREINRLRKRWGVSELGALLALADRMGVKLMRTGEEKPGRVTLDEAISRGLQSFDTEFIVVRVSDPAKTRSGGKMVTLVVGDETRSAALVAFDEAVETLEELEEGDVVRARNLTVSSFRNSPQLVVTRETELEVVGSEEDPNRIIERNISEVKHGEYVRVRGVVASEPVDTGERVYFWLSDETGSTRVNLWGEEAERALDLDYGDGVIVEGWVSTRGDHPTINILRTQGRVEPAEVSIKPAIRKRVEELGKGDVAEVSGVIVAVYARRRYYEACPTCGRAMRKGECPEHGAVEPERRPVLNVVVDDGTGTVRTVFFGEHAVEFAGYETTREYLEADESDIEKRLLGESVSVVLRVRGEGVVEDYDAVALRARILNEEDFKREIPILVRELKGEESEGEEAE

SEQ ID NO: 1440 - protein, 317 aa, Methanopyrus kandleri
VKERKLSDLDLLPDETVKKLEEKGIVTVEDFIYADPKYLSEVTGMSERDVEDIQEELRNIDVEFETLEKLERKRRRITTGSSALDEILGGGVPCGELTEFAGPFGSGKSQIVFQLCVNVQLPEEEGGLESKAIFIDTEGTVSPGRIKGMAEALGLDPGEALRNVFVTQVRSVEEQMRAAEEAHKLCEREDIGLVVIDSLTAHFRAEYSKLGDVSERQARLMKHVDQLRNLAMDHDVAVVFTNQVHVDIEAATKGKGRRYEPVGGTIVAHQATHRIMLRRAKGEVRIARIIDSPYLPQREAAFRITEEGIRDVEFPER

SEQ ID NO: 1441 - protein, 375 aa, Methanopyrus kandleri
MEFDVVVVGAGPAGSVAAWAAAEAGCDVLILERKAEIGVPKQCAEGISARALEEVGIRPDDGWIAAEIERGILSLPSGSKFEVEVEGYVLERRVFDKWLVVRAVEAGAEVELLAHARRALLDEGRVVGVEYEGEDGVHEVRARIVIAADGIESRIGRTAGLVPQLEPDHICTCAQYEVVGDRYDPKAFMIHFDPERIPGGYAWVFPKGENRANVGVGIRGSESSPGLALKTLDELVEGPLSELVAGTPVEVNVGGVPVCGPVERTYGDGILLVGDAARQVNPLTGGGLNTALICGRIAGEVAVEAIEEDDTSASFLKRYQDRWEEEFRDTFECAREVAEMLPELDLKEVVEFLSSVENLEEMLRTSGILEDVWWG

SEQ ID NO: 1442 - protein, 68 aa, Methanopyrus kandleri
MPDVRRCDFCGRIIEPGTGKMFVKNDGTILWFCSSKCERNMLKLGRDPKKVRWTEKHREFMAEQRGEL

SEQ ID NO: 1443 - protein, 74 aa, Methanopyrus kandleri
MVECDYDPTEDATPAEVVEILGRTGMAGEVTQVKVRILEGPDKGRIITRNVKGPVREGDILLLRETEREARPIE

SEQ ID NO: 1444 - protein, 130 aa, Methanopyrus kandleri
LPEFKVVVADPEKARSYQVEVKGEDAEKLIGKRIGDVIDGEIVGLPGYKLKITGGTDKDGFPMRPDIHGPVRVRLLLSGPPGFRPERKGERRRKTVRGNTISEDIVQVNTVIVEYGDKPVEELLGEGGEE

SEQ ID NO: 1445 - protein, 412 aa, Methanopyrus kandleri
VDDERFQQAEMNIGMVGHVDHGKTTLTKALSGVWTDTHSEETRRGISIRLGYADTVLTRCPECDTYSVEEKCPECGAETEWLRRVSFVDSPGHETLMATMLSGAAIMDAAILVIAANEPCPQPQTREHLMALEIIGTEDVIVVQNKIDLVTPEEAREHYEQIVQFLEEETHLDPDKTPIIPVSAQHKANLDVLVEAMYEHFEPPEYDLDAPFRMYIARSFDVNKPGTRPSDLKGGVIGGAIVQGEVEIGDEIEIRPGIRVERYGRTEWEPVYTEVVSLHANVTPVERARPGGLVGIGTKLDPTMTKADRLSGQVAGEPDTLPPVRHELLLEVELLERVVGTEEERKVEPIRTNEVLMLTVGTATTVGVVTSARDDEIEIKLKQPVCAEEGDRVAISRRIQRWRLIGHGVIKG

SEQ ID NO: 1446 - protein, 130 aa, Methanopyrus kandleri
VTIRVVLDANFLMIPHQEGVDVFSELDRLLGSYRPIVPRQVLEELERVKRAATGRDKIAARVALSLVDAKGIEVVDVKGRDGDEAILNLARRWDRVYVGTRDKELKKRLWKLGVPVITLRQRTHLVIERG

SEQ ID NO: 1447 - protein, 196 aa, Methanopyrus kandleri
LEVPPSPVLSDALGKRYVLRGIRHIVGPVPICGRAVTVLVEGTDWGTVVEAIDEAEEGDVLVIQARDRARAYWGGLSSLSAKRKGLAGTVVDGLVRDVDDVREIGYTVFARGVTPRAGTHRRSGKINVDLYVSGVLVRPGDIIVGDESGVVVVPEEEWEDALKRAREILELEDDIRTDIAANRAWWEIVPDKLGGW

SEQ ID NO: 1448 - protein, 176 aa, Methanopyrus kandleri
MMNLWKDLEPGPNPPDVVYAVIEIPRGSRNKYEYDEERGFFKLDRVLYSPFHYPLDYGFIPRTLYDDGDPLDILVIMQDPTFPGCVIEARPIGLMKMLDDSDQDDKVLAVPTEDPRFKDVKDLDDVPKHLLDEIAHMFSEYKRLEGKETEVLGWEGADAAKEAIVHAIELYEEEHG

SEQ ID NO: 1449 - protein, 183 aa, Methanopyrus kandleri
LYELVELETTVRIPPTQFTSDVEDAVLKALENDVEGKLFREDDTGEPIGFVVFVDEILDVENEGIFPGDGASYHRVRFRALVFRPVEREVVVGEVTRVKEYGAFVRLGPLDGLLHVSQILDEYMYYDGAREALVGEETGRELKRGDVIKVMIIGVSLNEERPRDSKIALTVKRPGLGKPEWWE

SEQ ID NO: 1450 - protein, 64 aa, Methanopyrus kandleri
LSKLKACVRCGYLVEEDTEICPACHGDEFTENWRGIAVILDTESQTADRLNAKIPGKYALRVEE

SEQ ID NO: 1451 - protein, 191 aa, Methanopyrus kandleri
VTVVLRLPRELRPELRRPWGTLYPRPSIKTYRRLHEESEVLITVGDMTTRSFLRCSIRPDVAVVDRKMLRTVPVDPGNKFPVTLDVNNPPGTITREAWDTVRRGIDYALDGDATLIDVTGEEDLLAIPAILIAPENSIVCYGLPGEGMVAARVTQHLKDSVLRLLTRFRGYDEWKSRSWISGITPCCTAKR

SEQ ID NO: 1452 - protein, 116 aa, Methanopyrus kandleri
MEVEILDQRDNPLLYRKEVKFVVRHEDSGTPQKSEVLRKLAAILDVDKEVVLIDRMESEFGKRETKGYAKIYKSMEHLEDIEPEHMVERHKKVLEELESESEESEESESEESEEEE

SEQ ID NO: 1453 - protein, 60 aa, Methanopyrus kandleri
MGVPRRAKLYEVKDGKVERKNPFCPRCGPGVFMADHGNRYACGRCGYTEFKDQPEPKKKK

SEQ ID NO: 1454 - protein, 206 aa, Methanopyrus kandleri
VEAGDVIALGAESLLVRHDWLGLLAVYKIRLPKPYRHPSLDERLRRLRTRREARALIRLPEMGVPTPTLYEVDLDLSLLITEYIPGRTLKQATESSFDPDHYRKLGKLVGRMHEHGFVHYDLTTSNILVSGDDLYIIDLGLSEDSDDPEDHAVDLRVFERCLESSHPEVKEEAWRAFLRGYREEREEATDTVLRALEDLKSRVRYI

SEQ ID NO: 1455 - protein, 286 aa, Methanopyrus kandleri
MTDLNLSLFRRDCRFVLEELGCVVEEVDSDYQLDFVVRSDDFCFALVCVGGLSDLASISALGEWEEGLAEIARDAEALGLGALVVFPREPREEVVSVSAFCEHYGLGLAVTEWETLPLEVIEDPFRLDYGSATEVFLEAKLGRIPEWPDTEPLEDLLVGDRPVTPGDVVQVVKREVSLDWRDLVMRLRWAGYSGEGLSEALYSALMSDEVEMTEDGELMHVPERLSEVLGALLVWLQNRGRVPEDEVYEFLFAQFGVPYDVTYVALKKLEERGEIEVKRGLVVAKV

SEQ ID NO: 1456 - protein, 346 aa, Methanopyrus kandleri
MICVGIESTAEKLGVGVVTDDGEILVNVKAQYIPPPGSGILPREAAEHHSRELPELLERALKNAGVEPEDIDLVAYSQGPGLGPCLRVGATAARTLALTLEVPLAPVNHCVAHVEIGKLAARQDGFDFDEPVTLYVSGGNTQVLALKAGRYRVFGETLDLPVGNMLDTFARKVGLPHPGGPEIERLAEEGEPVELPYTVRGTDVSFSGLLTAALRRYEQGDRLEDVCAGLQETAFAMLVEITERAAAQLGRDEILLTGGVAANRRLSEMMHEMAEDRGAEAYTVPPELAGDNGAMIAWTGILVHEHGLSIPPDEIPEKAIVKQRYRVDEAPVPWAARPSRSADSQG

SEQ ID NO: 1457 - protein, 275 aa, Methanopyrus kandleri
VRYKPLRFELECVEPGALPRFKGFAVRGMLLRRLKERFPGFVRRFLYGNHPIPAVTQVPPLTDERMVDVGDIVSFRLNLFGDAVDRDYEIILALVDGELRLGSARFVLRRVEHAETGEPVWDESAYRCVKPEKLDAREPVGRYLVVTFTTPTYIVHDGKPRVPKFHMIVRNAARKFTMLHRRFGLEGLTRRQARNIIEWAERAETIRMDYRFETLERRSARLGRHVFRTIVGTFVYELPPEPPDRVGEVLAFAEVYGVGKFNTAGLGRFVLGEAG

SEQ ID NO: 1458 - protein, 527 aa, Methanopyrus kandleri
VELKFSAEVELTLSREVDPAEIEPTVEEFVKEANEDLLQRGVPTGKEGAKIESYRVLEDTIEMEITGTRYLRPHEAAMRVRKRLAERLGRKHRVGVRDLKIPRYEVVLRFDREVTRDDVGYVPVADDVVVEDGTVRLTFQDVDEEMLRRHVIDRVIRLVAWAVEERSELVERVTKVEPGTVVDESGPREIRFDGDVTEEARRRGWVKEFPGRGQWIYTPPMAALFEVLRDFLLERVTRKLGFEPALFPKLIPLETMFRMRYLHGLPDGMYYVCPPKRDPELFDDFKRELYVWGELNERTLGSLKEKLRDPGYVLAPAQCEPFYELLRDEVVDPERLPIKLYDCSGWTYRWEGGAAKGLERVNEFQRIEHVWIAEPEEAERIREELLEATKRVAEELELEWKVVVSDDPFYLEGRLLEDRDIELPDVPSYEFEVYLPFKGERSSEEAWISVGSFNVHGEHFVDGFNVKEKSGRTLFTGCAGLGVTRWVVGLLAQHGFEPEEWPEPILERIDEKFGGLPEVPKTLTWPE

SEQ ID NO: 1459 - protein, 211 aa, Methanopyrus kandleri
LVRDKWKDKVWYTILAPDMFDNVEVGETPADDPEKVIGRVLETTLGDVLDDITKHHIKVFFRIYDVEGTTAYSKFEGHRLMRDYVRSLVRRGTSRIDGVIDVVTKDGYKVRVAGLAFTTRRAKTSQQRAIRKEMFKVIEENAKECDFDEFIRRCLSISEEESIPEQIKEAGRKIYPIRQAEIRKTEVLEEPNGLPPYEAVGDRATPELASY

SEQ ID NO: 1460 - protein, 348 aa, Methanopyrus kandleri
MFLVKTQRNLEDVAAAMIEEETGAEAKPRPFGYLGLVIVTGHVTKDELEKIPEVERAIPVEAECRADPKEIAETAAELAETKISEDETFAVRTIRRGEHDFTSVDVNVEAGDAVRKATGASVDLDDPDKIVWVEILRDRAYLAVLPGEEEWKKLPPGKPEADPLLAKLELAQIPYLGDPRAAYSMGERIGRAVQGFELKSYIVTPYEPVNAVELLHFLRGLRDGVKSRMDVQRESYGREFRRTELLLYDLYQLIRLKRDALIIGTDPKGDPYTEIRKTLGEALREADEVVVLAGSRVGLPRGVLRACDFVVDLCPGVTFATEHVVPSVVTALVDSYLEAEGSEDREGR

SEQ ID NO: 1461 - protein, 271 aa, Methanopyrus kandleri
VNRTGGSPGALPLEVVGVVHLPPLPGSPRAKSIEEVVERARRDAARLEDGGVDAVLVENFGDTPYYPDDVPKITVACMTRAVAEVVDTVSVPVGVNVLRNDGVAAVDVCAATGASFIRVNAYVEAVATDQGVLQPVAHMVWREIDRLGVDVEVYADIRVKHGRPLDDRPVEEVARDAVERGLADAVIVTGSATGSPPRPEEVRKVARVVDRVLVGSGVTPENAHVFLRAGAAGFIVGTYFKKNGITENPVDVDRVRELVRFIRRSGVERWP

SEQ ID NO: 1462 - protein, 226 aa, Methanopyrus kandleri
LALIQKRLNRRELEWVRKRVAREAARLLYEGAVDEYIDAKRLAARRLGVDVMPSNREVAIELDRIGDELEGEEKLHRLKRLREEALKVMEAIEDLEPRLIGSVWRGNIKRESDIDIAVLGTTDPEEVIERLKEAGIEVLDVEEVVITERGGKPLDIPEHYVNIKVRTPGGEKAEIGVTVSSPELERKGRVDLGRCDFFGDKITGLSVEELRKLLREDPYRKFIPRG

SEQ ID NO: 1463 - protein, 184 aa, Methanopyrus kandleri
LRVFIGVTGASGQIYARRLIEVLHEEGVDVEISVTRSAEYVMEQEGVDLPENVRRYDPKDLTAPPASGTYRIDAYIVCPCTLHTLSSVAVGVAGDLIKRAAVVALKEGRPLVFVVRETPWPRSALQAALKLREEGAVILPACPAFYHGPTTIEDLVDYVVQKVLDTIGVEVDLVRYQPRGMNFR

SEQ ID NO: 1464 - protein, 203 aa, Methanopyrus kandleri
LILTPVIAVTGVLLGLLYAPISVVIAFLVETVLTSGLSGPYRLVIAAVVVAPIVEELSKGLGFLVVPRVLAGALRLASRFPVIGPTVGTAAKVVRECGRRPVGTVTVAATTALGFGSMENVFYALVGLKFGLLGPIIVGFVRTFTSLPIHVIATSSFGLLYGSLRRRWLGFAVGYSTAISIHAAFNFAAVYARYKATHGLIGT

SEQ ID NO: 1465 - protein, 91 aa, Methanopyrus kandleri
VFVAKYLGSARYSELDEELKDFARLKAHLAGVDLNRDPELMIFNVEGTSSYYIVFLEEVESEEDVERLLREDMGAELSRDSKASVRRVLNR

SEQ ID NO: 1466 - protein, 184 aa, Methanopyrus kandleri
LKAQWVALNEVVSELRARGEEVPGEVLENLRTARVILHHYEFDPHTSARTLGKAHKYLDRAQRALARICESHPDLLDKLVEWPKRVKELAARFREDTARSKFEPMPNRPVPRAGDGFARVRLPEPIEVERLQDVCEFAGVIVEMKEVDVVEVFGDRDRVGTALKELRELPESWKKMLEKRKSNE

SEQ ID NO: 1467 - protein, 206 aa, Methanopyrus kandleri
VIGIATADFHGDVEKAEQVAEKAADEDADVIFVAGDVSDFNLEDPAQVAEEIVDVLKEHGQEIMAVPGNCDTPEVVRVLDTSGVSVHLKVKHIGRYDVVGMGGSNPTPFDTPLEFEEDVIESRLRELMNSTDEPVILLTHAPPKDTAVDKVEAGDHVGSEAIRKIVEEFQPKLHICAHIHEAAGEDELGNTRVINPGPGGTVVVEL

SEQ ID NO: 1468 - protein, 200 aa, Methanopyrus kandleri
VKVNPKFPWEREVIEFVRTEMSEVSPSHDFEHVKRVVGLCEFIRRKEGGDPEILRAAAWLHDIGRPAEERSGEDHAEVSAEIAEDLLPRVGFPSDKLGEVTHAIRAHRFSTGPEPQTLEAKILQDADNLDALGAMGIARCFCAVGERGTSLESGVEHFHEKLLRLPELMHTETARRLAEERRRRMVLFLEWLEKEWRMRS

SEQ ID NO: 1469 - protein, 151 aa, Methanopyrus kandleri
VADDEVKPIVRIADVDLDGHKKVPYALTGIKGIGIRMAYAICRELGLDEEKKLGELSDEEIERIEEEIKKLSEGESNIPSWMYNRQKDYETGEDMHLVGAELEMTVKQDIDRLKKIRAYRGIRHELGLPVRGQRTKSSFRRGRTVGVKKKQ

SEQ ID NO: 1470 - protein, 186 aa, Methanopyrus kandleri
MGDPKRPRKKYETPRHPWEAERLEYERKLMRKYGLRRKKELWRHQTQLKRWRERAKELMARTDPEAQREREALFRKLYDLGILDKKPEEATLDDILRLTVEDVLERRLQTIVYRKGLAKTPLQARQLVVHRHIAIGDRIVTVPSYLVSREEEEEVDYSPYSPLKDEDHPIRCEARGESPEETAAEE

SEQ ID NO: 1471 - protein, 137 aa, Methanopyrus kandleri
MAEKEGKKEKKERWGIAHIYASFNNTIITITDLTGAETFARWSGGMVVDADREESSPYAAMKAARRAAEEAMEKGITAVHVKVRAPGGHGPKTPGPGAQAAIRALARAGLKIGRIEDVTPIPHDGTRRPGGKRGRRV

SEQ ID NO: 1472 - protein, 275 aa, Methanopyrus kandleri
MSPLRVRLYDYRKADVERATFIIEETSAEFVNTIRRALYTLVPTLRIEEVIIYENDTPMYDEMLAHRLGLIPLRVDDIDQFELPDLCDCGGKGCEKCQVRAELEVEGPTKVYARDLKFDHPDVEPAFPDTLITEVGEDQRIRLEVIAVPGLGLEHAKWKPVSAVGYKGLPELEIDEDKLKEKKITYECPQGIIRIENGEVVHIDEDRLPECRMYKEYERETDGAVRVRLRDDAFVFNVETDGSMSLDTAILKALDAIEHKLESLKKNLQKEVSGE

SEQ ID NO: 1473 - protein, 127 aa, Methanopyrus kandleri
MTWAPTGPTNVELRKLIRDLKKAACEYNAPVWRDVAERLSRPRRQRAEVNVGKLDGLARRGVIQEEETVLVPGKVLGDGVITQPLRVAAWRFSRTARMKIEAAGGECLTIRELLEENPEGSYIRIIE

SEQ ID NO: 1474 - protein, 159 aa, Methanopyrus kandleri
LVEYAHSKPVDPEEWTVIDAENAVLGRLASVVAKRILKGERIAVINTEKAIITGKKNTIKEEWLQKIQRGDPKKGPFYPRRPDLIFRRVVRGMLPWKTKRGREAFKRLRAYIGTPRWVEEANIEPERVAEADMSRLGHLWYVTLGELSEELGYQMPGGQ

SEQ ID NO: 1475 - protein, 134 aa, Methanopyrus kandleri
MGRVVQTTGKRKTAIARAVIREGEGRVRVNKRPVNIIEPEMARMKIMEPLIIAGEDIVSQVDIDVKVQGGGWMSQAEAARIAIARGLVEWTGDPDLRDAYMAYDRHMLKGDPRRKEPKKFGGRGARARRQKSYR

SEQ ID NO: 1476 - protein, 72 aa, Methanopyrus kandleri
MIIPIRCFTCGRPIAHLWEKYVELIEEEGMEPGEALDELGVDRYCCRRMFLSHVDLLEESLPYTPPRLGMPR

SEQ ID NO: 1477 - protein, 453 aa, Methanopyrus kandleri
MRAVATLLTCMLALTGAASAGKYFEVTQTPVVVSLQGVPLSDVRVKFTDEGKQVVENILSGLKVKVDSEEVQVTNVARKIAEAREGNITNEEYVVGALGYEVPEGKYFVGYLQVKSGEGETKKYVVRYEEEQKAVIKSAPGFGSFTATVVQVLGEYDDKGLPLMTPSIDPTEVKDEVLLCLPVIKEITLKPAVLQMDWYKILEKAEPGKVFVKLAQVHAHGEGDKIEVIYAPTKVDALQLLVSGEEPLIPTQEDMVSTIVDPYMEELEAVVDTKIDEFLKPIQEKVQGNPALEILTERFLPTFLKTLAGKQILRVKETIVSALMPHTQYVRTFLVGLYMSQYPDGVNVNTLMARKAAYESPMYEILVSAVKTSYDMMLESLKSTLSNIIDSIVDQYADEIAEMVGTTTEDVKQTVEKLTVGVLKDLLTGDYVDYLIKLVALNVLTSMGSMGIL

SEQ ID NO: 1478 - protein, 309 aa, Methanopyrus kandleri
VSSFANRDVISVRDFTRKELEELLSHAEEMERVYERGGDDRLSGKILATLFFSPSTRTRLSFESAMHRLGGDVISLGGKEAASTAKGENLADTVRTVEHYCDVIVLRHPKEGAARLAAELTDVPVINAGDGANQHPTQTFLDLYTIMKEKGRIGGLRIGLLGDLKYGRTVHSLAYALALFGAKIHLISPEELRMPSHILEELEQIGAEVEEHRDLEEILPDLDVLYVTRIQREMFPDPEEFERVKGSYKVTRELIEEHARSDLVILHPLPRVDEIEPDVDELPQARYFDQVRNGVIVRMALLDLILGGG

SEQ ID NO: 1479 - protein, 156 aa, Methanopyrus kandleri
VIVALKVKRIEMGTVLDHLPPGTAPQIMRILDIDPTETTLLVAINVESSKMGRKDILKIEGKILSEEEANKVALVAPNATVNIVRDYSVAEKFQVKPPERVEGFLRCPNPNCITNDEREPVDTVFVRESKKPLEYRCRYCERTVREDQIRELIRPS

SEQ ID NO: 1480 - protein, 304 aa, Methanopyrus kandleri
LSDPRFSYFRTFREVVRQKSFSKAAEALGITQGTVSNQIASLERFFDARLFVRTPEGVELTEEGEIALEAIETVLDAVERAKDKIAAVSKEPSGKVRVSTSTVPGGYLLPGSVKEFRSEYPKVDVIIRVCDSREATEHVLSGDADVAIVGTDAFVTRKSVEVVPIASEELVVILPPDHELADAMEVSIDDIVGEPYVNRESGSGTRREVEKYLKSHGLGFEDFKIVEEVGSTEAVITSVSQGAGISIISERAAKRAESAGLIRIARLEDRPRRFFYALKSDKPLHASATEAFWEFLLSEFRGKS

SEQ ID NO: 1481 - protein, 514 aa, Methanopyrus kandleri
VRVLLLTGRLAADDVRKAAEDFEWAEVKVLPIDVAALMTTRFVIEQLRGEDLTRYDYILLPGWFRGDVRKLDEALDADFRLSSREARDLPLVLRKMEEGFVPSKDVPACVLLRDEILRELGRKVRDVERDIPERSWIDVGPVRIARGCRPRVLSEVFADDLSPEEAASEAERRAELGAEIVDLGFHERSPEDVRQIVETVRDRVGDRVAVSIDSGDPGILEAGVEAGADILLNAFPDLKEPVDLADEYDVPVVLVPENKKPEIAVRQLRELVDLCERRDVDYVLDPVMDPPGGIVESIVRYRAVAEEFPEAPLFFGAGNVLELIDADSPGTSALCAQLAVELECSIIFTPEASGKTKMSTLELAVASRMCYVAHKFGGFPKDVGLDLVVFKDKRVDSVSASGLDAERFASKPQRDVRGDFVILTDHDRGVLILEHRCGDDEPLRLESDDGLELGAAAVSLGLLSDLRHALYLGYELARAEERLKSYGQYIQDDGIERYDRLLHDLKILEEVEER

SEQ ID NO: 1482 - protein, 246 aa, Methanopyrus kandleri
LGLRIGWGITGAAHLLVETFKIMKEISREHRISAFLSEAGEEVVRMFGLWDDLREICPGGFYREVFTQSEEGASCPIIGRFALGKYDLLIVSPATANTVAKIAHGIADTLVTNAVAQAGKGDVPVWVVPCDYEEGKIRTITPYMVLRERCEGCGICVDACPRSAIDMVDGKAFIRLLRCVGCGKCAEACPEDAIHGGLEYEMRVRSVDAENVRKLERIEGIEVLRHPEEIPERLGELAGEGTTPDR

SEQ ID NO: 1483 - protein, 75 aa, Methanopyrus kandleri
LAEEGSELKEVIIGAPAMADTDRADTYVNDVRDSSQFFGRDARLYFGLNVNRFAGLACGMVFAGVLLVPLLLLAF

SEQ ID NO: 1484 - protein, 135 aa, Methanopyrus kandleri
VSVSPVRCEPVVDVEEPVEAEVLVSSQRLSFLGGVDPKTGEVVDPSHELCGEKLTGRVLVLPGGRGSTVGSYVLMEMADRGTAPAGIVVREAEPILVVGCVLGDIPLFHRPERDLVEELSTGDVVKLLPGGKVEV

SEQ ID NO: 1485 - protein, 65 aa, Methanopyrus kandleri
MVERSKEEALFIKALKEKFEEDPEEKHTKFYVYGGYRQSPRKEFAKGALREFEPAGERDLIVPAE

SEQ ID NO: 1486 - protein, 349 aa, Methanopyrus kandleri
MEEPENLAVVPPSCEAGPCGNSCVFCYIRQNPPEVLREHGGNVDTTRHDTLNDPHLEERVERARDRYPDLRLRIVDTAGNVGIDEGRVESLAAAGIDEVQISLHTTVPETRKKLMGNPNADELLELLPKFEDVGIDVIADLVLTPGYNLRELPRTCEDLETMGARQVRVFPVGGTDLARGFRFPTRRELEWMRETSRRLDCELNIEVIPSPTIDALLGEPAFDPPDLPEPDFEAVIVVGELAAPIFEPAVRELENVELLVVKNRVFGGVIGASSLLTAKDVLREIERYEPRTEFPVLILPDAMFSPDGRTLDGWSREELVGKLAALGYTVVTCRKPEEVAKVLASPSPW

SEQ ID NO: 1487 - protein, 310 aa, Methanopyrus kandleri
LNLRLTVLSGGTGTPKLLRGLRELEADFSVIVNTGEDDEILGLYVSPDVDTVLYTLAGIVNDETWYGIKDDGFRGHEFLERLGVDEPLRIGDADRALKQYRTYLMREKGLKLSEAVDEIRRRLGIKWKVYPMTDDRVTTIVETDEGDLHFREFWVERGGKPPVRGVRYEGAEEASPPPDAVDELLRADVVLIGPSNPVTSIGPILSISEIRHIVREKPVVMVSPFIGREPVSGPAGKLMRAVGFEPSVRGLVEYYREWGVEPDVLIMDERDDVELPEGLEVVRTDTLMRDEKDSVRLAREVLRIVEELVG

SEQ ID NO: 1488 - protein, 233 aa, Methanopyrus kandleri
MSPRLVVPAAVVVVAIGLLAYWYLYPSEGASEVPIKAKIELPKPLELKMSVSEALKKRRSIREYRDESITLRELATVLWAAQGITDPRGFRTAPSAGALYPLRVFVVVRKVEGLAPGIYVYDPKTHTLGLVRRGNFTTELQRACLDQEWVGHAAVDLVIVGYERVLQPRYGERSFRYMALEAGHVGQNIYLACTALGLGTVAVGAFYDDRVKEILGITEGDAVPLYVFPIGRR

SEQ ID NO: 1489 - protein, 196 aa, Methanopyrus kandleri
VGVAVRDVVRYGRLKLLVFENVYPPAEDSFLLAEHQGVSGSERVLDVGTGCGIQGLSAAAKGCEVVATDVNPAAVHCARWNAHLNDLNIDVRVGDLFEPVRDERFDIVLFNPPYLPGRELPGSDPISRATEDPAVIRRFLKDLLREEIRWDEARIVVSSLTPKKYLEPLQRFEVEIVAEEPLFFEKIRVLALRPSR

SEQ ID NO: 1490 - protein, 102 aa, Methanopyrus kandleri
LFVVVYSTAEDEEEAKRIARKLVEEDLAACVNLWPIRSVYEWGGELCEDEEYALLVKTTAERAEEVVERIVELHSYETPAVLVLPVLGGFEGFLEWIREQTR

SEQ ID NO: 1491 - protein, 452 aa, Methanopyrus kandleri
MDLEGLSLHMLEAGASEDEIRELLTDLVKIWKRDWSEDEIREFVDAVLEEVHHVRKAHFLGGRVGDILRPPESGVGMGEMGVGSRGEGDFFVHELLTRLAAKASEGALVSPEERDDAGAVRIDPDEVILVSAVDGMHSRLSEFPFLAGFHATRAAMRDVLVNGARPRGLLVDLHLADDGDVGRLFDFTAGVTAVGAATGVPILAGSTLRVGGDMVLGRRLVAGVACVGTARPDELTPRRDAEPGDLIVLTEGAGGGTISTTAIYHGYYDVVEETLNVDFVRAVEALREENLLSEVHAMTDITNGGIRGDATEISETAGVRLVFDEETVRSLVNDRVLRMLDELDIDYLGLSLDMLMVIAPEDVAERCVEALNGVGVRADVVGRVEEGSGVVLERDGEEVELDVKFRETAYTKVKRVIGEEHPEEFEEMKERVRRAYEEAERKLRWVLERLGE

SEQ ID NO: 1492 - protein, 77 aa, Methanopyrus kandleri
VSGAELIRELIMELRALRHEIHMLRVELEKLRSEVNEVEPDDDFSELLPQSEHVPEVVIEDSGLGPDSVAGERWRLL

SEQ ID NO: 1493 - protein, 169 aa, Methanopyrus kandleri
LPYVPLFVRVERAVIVGGGRVAERKARTLVDLGVDVIVVAPEESEWIRDLPVRFVRRKVKGPEDLPEADLYVVATDDPDLNARLERALSLVNRVDTPRPKVRFPSVLRSGDAVLAISTGKPRVTKALRMIAAELLGPTLRKAAELSEDARKWSLERVINELEGLRWQDQ

SEQ ID NO: 1494 - protein, 256 aa, Methanopyrus kandleri
LTVYVDATDILDPRWLFMGDPDRIYVFRTGHAPMHLHFELKRLVGFRVSVDGNAITGTVTPEGCLSSTCITPWVAQIVDARPGDDVLVVGGPEDGIDRVFELFPDVEEVEPEEPEPIREPHSNAVVMPNRKCKAARKYDTELKEILKKAGFEIVEPSVERYVCGFEAMQRTILRGDARIGIAASFDLVSGEYLGLIPVDVHGVVGTPRLNPELRVKTKDAPELLRNLLRMSPEHRREVYGQRLLEEPNWDRKFPNA

SEQ ID NO: 1495 - protein, 355 aa, Methanopyrus kandleri
LEPVSFRGEVKTVVIDVGVGTTDVVAYTGDPEYSPRFVGPSRVSTLAQRLRFMLREPPRYLALIGVPMGGGPTTREFKRLMKKGTEIYAELDAALTLHNDVRRLEEMPRLHIVEDPIEEVPPDSPVVETYDFRVSDVFEALQRSNVDMDGVETVVACVQDHGYHPDYESNRKHRFERLFRRYLGANGCRPDRMTFDDVPPESFPRLRAAYMEAESAGVDAVAMDSKVPIAMLGRVDSDADRLLVIDYGTGHVTAFLFDGDRIVGVYEHHTIRLSSEKFERQIREFVEGKLENEDVYRDGGHGCHNVSPMDWDELEDIVSLGPKKPEFQLGRDPERFPDRMMPAYGPAVYLTDRGE

SEQ ID NO: 1496 - protein, 205 aa, Methanopyrus kandleri
VKVVLKAGTGAVKEVDAVKNAITAFEGELLVVPGGWRFANIVREVYEDGDLSDDAAHWMAIAAMDQTGYLLSDLLDLPTTEEPEFGGKLVLLPYRYLRMKDPLPHSWEITSDAISVYVAAEANANLVVFAKDVPGILEDPDDPSSLIREIDARELEGNWTALDPVAPRLAEEYDLELRVVYAGNPDNLLRAMRGEEFVGTRVVPG

SEQ ID NO: 1497 - protein, 181 aa, Methanopyrus kandleri
MIGPLDPLRDYLRELLGEGFVLVGLGNPLAADDGFGHWVARRLSPLKTHKFKAVAAGVWLERLRLPNEPVVLVDTVRVDREPGTLVVVKEPRLGPDRGSHGPPPDELMDVRLLIGFVPVKSGFGPMSPEAKSVADAVVRVVRDVVLEGTEGPTDRGLRGSAALHRERQKSAQTTRGSVRPL

SEQ ID NO: 1498 - protein, 372 aa, Methanopyrus kandleri
VILQRDSDYSDGTVLGSMCTEPHPVAAEAFVAGLHVNLGDPYLFPNAYRAERECIGWLAETLLDHPAPEEAEGSIVSGGTEANILAAYAAREVTGGREIIVPATRHFSFEKAARMLRMKLVEAPLRSDYTVDVDAVQDLISRDTALIVGIVGTTETGSVDDIEALSDVAEDHGVPLHVDAAFGGFTAPFLREEYPLPRFGFDLEAVVSVTVDPHKMGLVPPPAGGIVFRDDEFPKAIEVYAPYLSGGGASQYTITGTRPGAPVLALYANILELGEEGYRRIAFRCYEETLKVAEKARELGLELAVDPPHLNLVNIRLPDRGTAERLLRESEREGWKISVSTKPLGVRIVMMPHLDAETVSRFLELVARVLGG

SEQ ID NO: 1499 - protein, 268 aa, Methanopyrus kandleri
MEEGPIRVPNELKDRRELMKSLILAFIGLRQPRVHLGDIGGELGVSLQAIHNYVKELIDEGLVEKKGRAEYVLTDKGAEKALESINNIRRFSAKIAEALGKRMTWAAIAAEDIRKGEEIYLYMEDGLLYASKSRKTGARAIAQADAEKGQDLPVTNIEGDIPGLERGEVVFVCVPSAREGGTRKLDLDRLKEVLEKEDYDLIGAAGTAARAALNMLGIEPDLKFGVVDGAIMAALKGLKALVVITTPMLRRARDKAERRGAEYRIQYV

SEQ ID NO: 1500 - protein, 141 aa, Methanopyrus kandleri
VNKGEDNLVRTSITVPEQLLQKVNELIASGYFASRSEIFRQALREYLQRIEWTERVGDEEYFGALTYVFQHERAEPELVKVQHEFTDVIISTTHIHVSPEKCLEVLLLQGPGKRIAELAKRIRGVRGVEQAKLTVVSSEGE

SEQ ID NO: 1501 - protein, 170 aa, Methanopyrus kandleri
MKVRVGTTNPVKVRATERAFLRTFPDREITVEAVSVDPGVPPQPVGMEEVHQGAKNRAREAWNRGSYSVGLEAGLIRVGDVYVDLHVAVVRDPKGRETVGTSPGFQLPPDVTEEALSGEEVGEVFSELVGVREIGKRSGAIGVLSNGKVLREDLCELAILMALIGLETSR

SEQ ID NO: 1502 - protein, 157 aa, Methanopyrus kandleri
LTPLARFRKVVVGGTFDRLHLGHQRLLSVALELGDRVVIGVTTDSFVREEGKKGVEPFEERVRAVRRFVEEKGASDRVEIVPLEDRYGTTLEDDEMDAIVVSPETEPVALEINELRRKRGFPPLSIVVIPFVLDGDGRKISSSRLRGEVDEGPCRDD

SEQ ID NO: 1503 - protein, 265 aa, Methanopyrus kandleri
VVVQAWTDLKVRLLRLDASREILERYSRRQPELEGVLRGIEIEKARLHGELPWDYWERWEGEEPRDMRITVAASGGYDSTASAIILRKLGYEVESVTVDPGPMFLPPKLRRNVEILSEYLGTEPKFVEEDLSDVVEGALNEGRFHPCGRCNAKIRKRVMGEADTDVVAFGDGLPTGHHCVQPEDDRFKLHVPAALAKTKFELRRLVEEVLPEFHDYKYACPFLHQVHQRHPHLRRASIQRVLRELRHGFLEVGEALKAVYDILGG

SEQ ID NO: 1504 - protein, 273 aa, Methanopyrus kandleri
LKAAVINRSKGTVLAHSAEIAESFLARLRGLMFRRRLEEGEGLILKPPYRGRRRCAIHTFFMRFPIDVVFLADGEVVDVVERLKPWRVYVPEEPPEEIVELPAGIVSATDTEVGDSVEVVAGDLESELAVRILNRKLVTRKLAQVIMRAVAKSGLQGEVFYNKDTGCIHISGEDKYIVADTIKETFGDSVEIVEGRAKILSDDHSLVVIVKDAHSVLEKIGISRPGGELMYRKEPKPVRWGKQREKGADDGSEQAEEGDRNEGEGRTRHRGRT

SEQ ID NO: 1505 - protein, 239 aa, Methanopyrus kandleri
LNFVETFRRALRCLQPSAVVVDFDPPAESLRSTPVIKLPSGILHSVGPVEACASLGLKEGEPVLIASYSRCSLEFRPIRPEEARLAALDHYRVVSRILETMVELAVEGVEGDRVGTLCVISEGADRMYRTTVPVRVEDVNVMTGSGKRVLKALAKLDGAIVVDPEGNIEAAGAIFDVDSGSVEPGFGARHTTALHVSKELNCPVIVLSESGRIRLYHGGKEVLKISVSDLVAIRGFCDG

SEQ ID NO: 1506 - protein, 397 aa, Methanopyrus kandleri
MVRNIVVETMKRSPFTETEVEIVERKGVGHPDSLADGIAESVSRALCREYIERFGRILHHNTDEVQIVAGESRPEFGGGEVIRPIYILVTGRATAYVGDEEIPVGTIALEAATEYLEETVRHLDTEKHVVIEPKIGHGSADLRDVFERGEEVPLANDTSFGVGYAPLTTTERLVYETERKINSPKLKKDLPEVGEDVKVMALREDNKIELTVAAAMVSQRIDDIDHYISVVEELRDRVADLAAEIASDHDVEVHVNTADDYERESVYLTVTGTSAEQGDDGSVGRGNRVNGLITPFRPMSMEAAAGKNPVNHVGKLYNVLAHQMAREIYEETSADEVYVRLLSQIGHPIDDPKAVDVHLVGDVSEEDERVARRVADELLENITELTERIVEGEIEVF

SEQ ID NO: 1507 - protein, 458 aa, Methanopyrus kandleri
VRVLSEYKGKAGELLREHGLSVGDRVRIVRDDGVVVEGIIMPRSELGDDEHIVVKMDNGYNVGVRVDRIEKLEAPGEGHEPSFKPMEGEIEYDPKLPNVSVMSTGGTIACRVDYETGAVKPAFTAEELVGAVPELLDVINIVDARAVLDLLSENMEPKHWMKIAEEVVDALSDPDVEGVVIGHGTDTMAFTAAALSFVIEGLNGPVVLVGAQRSSDRPSSDAASNLIAACAFAGDGEVGEVTVCMHGWTSDEVCLVHRGVRVRKMHTSRRDAFRSVESIPIAKVDVKDLRNPKIEFLRSDYRRPEDGEPEISGGFEEKVALVKFAPGMDPEVLDFYVDRGYRGIVLEGTGLGHVSEQWLESIERAVDDGIAVVMTSQCLYGRVNMNVYRTGRLLRAVGVIPGEDMLPEVAYVKLMYVLDRTDDIKEVERLMRTNIAGEIEGGRVLGGFEPADGPHHRL

SEQ ID NO: 1508 - protein, 200 aa, Methanopyrus kandleri
LKVAIVEYGVGNLNSVYRAVKHLGHEPVVTDDPSELHDADAVILPGVGNFRAAAEKLEETGLCDEIRELLGSVPLLGICLGMQLLMESSEESPESRGLGVFRGTCVALPNDVKTPHMGWNTVEFRTEEFREFDGEMFYFVHSYRVAPEDDVVLGETEYGERFPSVIGDRGRLIYGMQFHPEKSGPVGLKLLGEVLTGASR

SEQ ID NO: 1509 - protein, 166 aa, Methanopyrus kandleri
LRMSRERIFREVKESLKNIQEVRSELGDNVSLSTLRYILASMVITLGRGVGSTFYRAGYDIGVYKAKSHDLKGIEEAFEYVEKAFERTGTGIIERWEMKEDGKIEITMRESATAAGYDIGKKLCYYQAGFIAGILHGATGERWEVHETKCMAEGHDHCEFVAIRRG

SEQ ID NO: 1510 - protein, 208 aa, Methanopyrus kandleri
VERVVVHGTLMDVFGVGVLLVGPRGVGKSETALELIRRGHRLVSDDAVIVECDDSYEYPVGRPPENLAGKMEIRLALAELYCPECGRVYTFSALKMKEGCDCGGDLKLRPIQDKIAVDVAELYGIRALRSRKGIGVVIKMIPGPHHPHHDPSMRPDEPVSSTPSEEEKVVKWVKERDGRVFHLDVVPGRDTATLIETVALQESLRRRR

SEQ ID NO: 1511 - protein, 119 aa, Methanopyrus kandleri
VVLSIPDWLGAALLLSLSDELHTGLVWGALRSQYLLLGAYLRVRHSALFVWLVHETLEFLFHTVILSLILPVPMAVTAASVHFGIDLFHEALLGTVKGRVTHRLMHLSLESAILYWLWG

SEQ ID NO: 1512 - protein, 87 aa, Methanopyrus kandleri
VRILRDLIGKPVIDSSAKHIGEVLDVEFDEESGEVTTLIVGHSKRPGVLRKIKWLGGEEKAVRIPYSNVVAIEDMVLVEGRWVSRED

SEQ ID NO: 1513 - protein, 110 aa, Methanopyrus kandleri
VLEPETFDVDPDIRPMSGHHDELVAVLKALGDERRIAALEILGHSEECLCKLAEILGENQPSTAYHLKKLLEVGLVTKRSEGGRTFYRLTERGERVLKVIRDLKDQLRRT

SEQ ID NO: 1514 - protein, 298 aa, Methanopyrus kandleri
MPLDPLLAAYLAVALDLVLGDPPNRFHPVAWCGRVMELVEKRVRRGRVLDVVWGGLTLAVGCGFLLGVCYPLHYIPMVGDALVLWVCISVRGLVEHLLPVERELREGNLDGARQAVRWLVSRDVSRLNGAEVASAAVESCFENLLDSVVGPLWWYYLLGWPGAVMYRATNVADAMFGYRGEYEMFGKIPARLDDLLNVLSLPVCAAALTVTLPWWILRARLRSLLRAARDVPSPSSWLPMYVGACALGVRLEKPNVYVLKGGDRLPTPDDVRRAAQIAVIFGLVAPGITYVAAGLLSP

SEQ ID NO: 1515 - protein, 343 aa, Methanopyrus kandleri
MTRCTSAESYDEDEVPRVVESLNVEGRVLVQAPDGLKRIAREVADVLEARGCEVELDAGRVFGACDITPGTVVRTDHIVHIGHYPIPEVERQIRELGATVHFLPTHGRKRVEPWMAEEAVEVLHNLGIDRVNVCATAQYVADLELVSEILRESGIEPVIRPGDGRRVATPGLVLGCNFSALDTSLPTIVVCSGSFHPAGVAIRTNRPVVQIDPTKGVLDSEDVEDVIRRILAVRLSKIREFNREEGFEIVESTALGQRRPDVVRVLDRPTWRLRYLTEDALRSLRRRQCVFCGCPRVPVDEAARFKRWVLLNPAELAAVRAGWKEYRLDEIPTPEDVLNALRR

SEQ ID NO: 1516 - protein, 120 aa, Methanopyrus kandleri
LYALGVGMRRRVRRQDLVTAVRWGLEEAGELGEIITITRKRDQPSGKALVEIGRRFGIPVRFVEKLADHTPSDSRARDLLGAPGSVCEGVLITHGYEIVRPKRTFGNTVTAALGWKRSRK

SEQ ID NO: 1517 - protein, 158 aa, Methanopyrus kandleri
VARVLSEAIKRSGRTVGVLMLPQSTGGSGRKWVGGYRWDCDVVVATVDRVSECDYALILSRFGACTNARKAVYDLSHQSFVGFEPPEGWVGIDCFRVARDKRVPAVHALILLGAMCRIARLCELEDVKKALLSEEGRLGAVSYRAVRAGWEEAGRWGC

SEQ ID NO: 1518 - protein, 315 aa, Methanopyrus kandleri
LKPKVVDLFCGAGGFSRGFKEAGFKILGGVENNPAPAATYRENFPEAEVIERDIQRVDSEEIVDELGEPDVIIGGPPCEPFTAANAERKPNPLDRLYDDPVGRLVLHFVRIIGDLQPEVFVMENVPAIMEGPLEKALRKEFARAGYDEIHFNVLQAVHYGVPSYRRRVFISNVRIDPEPTVERPKTVWDAIGDLPSPDSEVPNHELRPLSKRKLRRIRRLRWGEALSVIRGARGSFKNWLRLHPFKPAPTVMGGSRFIHPFEDRLLTVREQARLMSYPDDHVFEGGYETQYDQVGESVPPELARVIAEEVRDHLA

SEQ ID NO: 1519 - protein, 251 aa, Methanopyrus kandleri
VRKVPIAIGILAVVVIAAAAGYYYTSSNQLTVFAAASLKKPLTKLAKQYEKEKGVKVALNFGPSGGLTAQILQGQKCDLFFSADWKYVVKLQKAGKTAKTKKFLKDYLVLVVSKTGEKKGIKSVKDITKPGVTVAVADPKAPVGEYTQRALEKLGIWDKIVKNGNLKARPGTVNQVATMVKNDQIDAGFVYRSVAVGFGLPIVQMFPHSLTGPIIWGAAVIKGGNEQLAEDFLNYCLEHIDEFKKYGWSPA

SEQ ID NO: 1520 - protein, 261 aa, Methanopyrus kandleri
MIGRYEILSTLFPPLFFIFIVFPLVALVLNLTPQGIAEAFSDPYFWSATFNTILCAVAAAAAGVIIAIGFGYYHLFKRDSVIYRVADFLNDLPIALPHTVAGLALLLAFGRNYFGWLGENGLAFTLIAVVLAMLFVSYPLAARAVQAGVEELGRELVDVARTLGDEPPKAYVRVVVPALQEALLGGFLLGFSRSLSEFAAVIMFGGNLPGRTQVLASYVFTRAESGDLEVAVAASVFCMVLSLTMVALVRSVTGGLRRAEG

SEQ ID NO: 1521 - protein, 228 aa, Methanopyrus kandleri
VLRVEGVKFSYGDREVLRGVDLEVEPGEVRVLFGPNGSGKSTLLKIVAGILRPDEGRVIIGEEDVTDLPPEERHVGYVPQQPALFPHMTVEDNITYSLQNGRGDPDRLDELVELLGLKEHLDRKPDELSGGYQSRVSLARALFSDPKVMLLDEPLSDVDLAVKAGLVPRFREVLKETGIPALYVTHDPWEAERIGDSFTVLIGGKAVDVNSVDEALEELKRGVESVKA

SEQ ID NO: 1522 - protein, 415 aa, Methanopyrus kandleri
VSKRKYRGFVYTDDLAKPEEFIRFLRRFLSPPEPETVEVGPELSGRVLAEDVRAERPSPPFTRSAMDGYAVRSEDAEPGARLKVVGESRIGEGTDVKVGPGEAVYVDTGAPVPEGADAVIPVEFVERDGDEIIVEEGVDPGDNLDPAGCYVEEGEVLYRSGHLVEPVDVGVMLEHGVEEVDVHRPLRVSIVVTGNELVHRPSELESETQVVDCIGPVLTAELENMGCVEVVGTSLVKDDPGEIRETVEDYADRSDVVLITGGSSVGERDHVKDILDDTFDAFIHGIRARPGRPFGIAAREGTVAFTLPGWPTSCYSTFRVWVVPSLLVLAGADPLVVGFETEATGIKSKREVGVIARVRLTSDGAEGLSRDRSSHFALFRETDGFALVPPGGSERALILPLRGFLNLFDEVERKF

SEQ ID NO: 1523 - protein, 79 aa, Methanopyrus kandleri
LVKIVIHEERCHGCGNCVIACPVNACNSPNVWGGKGPEDGEDVVIKVVNGTVSVINEDLCEACMTCELACPVDAIEIKT

SEQ ID NO: 1524 - protein, 131 aa, Methanopyrus kandleri
MAEFTLLTGRTIWQGEAIETDKAGEIYPNATAICYFNPKDMSELGISEGDPVKVKSKYGEVIVRAKAADTDVPPRGIVFIPMGPWANKVVDPNTKSTGMPGFKGIKVEIEPTDEEPIEDMSEFMRSEYLSE

SEQ ID NO: 1525 - protein, 433 aa, M. Kandleri
  MISC_FEATURE: selencysteine
  MISC_FEATURE (120)..(120): selencysteine
VARKVIKDVVCPFCGTLCDDLEVVVEDGEIVEVRHACRIGAAKFLTAQEDHRHTEPMIKENGEWKKIDYEDAAEETAKMLVEAKLPVLYGWSATLVEAQEKGVELAELVGGIIDNTASVXHGPSVLGLQDVGVPSCTLGEVKNRADTVIYWGSNPMHAHPRHMSRYTAFTRGFFRPKGREDRTIIVVDPRKTATARLADVYIRVRPNEDYELISALRAAVHGIEIEREEVAGVPTEQIYEVADLIKEASFGTLFWAMGLTMSRGRHRNIDNAICLIKDLNEYTKWTLIMMRGHYNVTGFNEVLAWTTGYPYAVDFSRGYPRYNPGETSTVDLLTRGEVDAMMVIASDPGAHFPRKAVEHMARIPLVCVDPHWTPTAELADLYVPVTIAGIEWEGTAYRMDSVPIRMRKVVEPPESMLNDVEFLEMVIEKVEEM

SEQ ID NO: 1526 - protein, 103 aa, Methanopyrus kandleri
MELRCPYCGSRSCVNESALSLFLRASERAARYVVKGRDDVDEDPNFRPSFGEVGICKETSKRIWVCPYCHSLIPELEPDGMTARCPECGREANVAPSRRKIVC

SEQ ID NO: 1527 - protein, 581 aa, Methanopyrus kandleri
LAKELLIKNACVYDPLNGIEGEVMDIGVKDGKIVDPSEVDESKAKVIDAEGRLTMAGGVDIHAHVAGPKVNVGRIFRPEDSRRLQVAIKKLGTRSGTGFSVPSTTITGYLYAQMGYTTVMEAATPPLLTRHTHEEIRDTPILDEGAYTLMANNWILYEYIKEGELEKAAAYAAWLLRATKGFVIKMVNPGGTEAWGWGENVHSLDDPVPYFEITPAEIYQNYVKINEMLGLPHSIHIHPNLLGEPGNYEITTDSWDVIKKTGVEPNPEIGEREQVVHNTHVQFHSYGGDSWPTFESKAEEVAKYLNKNDHVTVDLGAVTLDETTTMTADGPLEWELQELTGFKWANYDVELETGSGVVPFIYSPKNPVHSVQWAIGLEIALLTENPWQVVISTDHPNAGPFIRYPRIIAWLMSEPYREEWIENVHPWVGQRAAIATIDREYTWTDITITTRAAPAKMLGLSDRIGHLGEGAYAHIAIYDIKPDEVDPSRDYEEVEKAMEQAWLVVKDGEIVVQEGVVVNEPVGRTYWVDVKVPEDLLEEVKKDLETKFRRYYSVNLGNYQVQDVYIPKEERIVIDARDRLS

SEQ ID NO: 1528 - protein, 267 aa, Methanopyrus kandleri
LKEVVLTPKGEPDVPLEAEVICPDEFAGKSEGEIEALKIYEGNSTVELGEYFDVEGDAGDSPGDTRIVIEGDVPWVKLIGYRMSAGEILVKGDVGRHAGAEMKGGKLIVEGDADDWLGREMKGGEITVHGNAGNYVGSTYRGEWRGMSGGRILVKGDAGDEIGEWMSDGKIIVEGDAGIMIGIHMQGGTIIVRGDVGVRPGAQMEGGTVVVCGRAEDILPSFRYEGLKEDPVEEATGTFHLFTGDYANGPKVEGELYLSTALNEVPR

SEQ ID NO: 1529 - protein, 99 aa, Methanopyrus kandleri
VKTLRMSPEELLEYFRKEVEEGDRLELNYAFVHIPGEVVKITRYRLHLYVESEVAPGIRRYDLEEICSMMLEVIHEPKEGKPVKIVVEGADESPGIGIL

SEQ ID NO: 1530 - protein, 615 aa, Methanopyrus kandleri
LTRTAYVLLALLAALVGQASAASVGSQLTLDTAMQWDQQQNKYVDSDVAARDGYYYQVKGPAVAVDSTGTVLVAWEEWSENGNVVGKIGLRTPSGNAVYVTPEQDCVYFAPALTSYDQGKFLLAVTEVPQSNLVAQDYGKLLVYKVDVSNGQITVGSSPVQVADNAAYPHVVYLGSDNDNRYVAIVYERWNGETGDVELQVLKIDTNGNIIPVLSQPLVIAEGVCKDYVKGDVHYFGHARPVASLYQEGDSKYLIVVLTNYSQATPNVSEWGFYGEWKGCKVEAYVVDLPDFSTIGGLSSENVHKVQGSLSASEDTNECPWVCDNVVVYRVGSLWGGMSGDTTIPDINAALIVKSRDSWTFSSDTTIYRRIYTQTGPAVARVYTNNDDKTPYYLAVFADNSGGFGKERLTGVLFRVKDGKIQVIAQYDLTGFGSGYYYYCPTVATVKSKYGDAELVVACYKGDSGSGGHNIGDAVMLTVSIGDPVDEFMSSAAELLNSLTGTVDVVNNAIFNSYSGLKKKVSDLEKKSNELTQTTQELQNKVSTLEQGQEELKQEVSKISQEVSGLKGSIDECKNTVENLEERVKKLERRKIAVSPMAVLAAALTLAAYRRYGRQ

SEQ ID NO: 1531 - protein, 558 aa, Methanopyrus kandleri
VPRRCRPPSRRYGLNFYFLHLPYVVGSLRSGSSRLKVWGSERVRVLVATIAVLITAAPTTALDWKNTEPYKELQTECADAVKAGTVWWFITTDRGGPYLASAHLWNPQLTFGYELKAISLVYPTLESAERAGLLADRVPAGVPAMTPTSEWSKASEEAVRWVLDNQNEDGGWGQAWTYRGITHSGSLTSDTAVAIMLLIHEIERRHESGGEYGELVSAVRRGLTWLLDQQLEDGGWSRKREEAREGAPWHTRAAVAALLMALERRDLLNLDDSAVDRIKSAIERGVSWLLERQNPDGSWYSGLMCQEYSADTQAYILSTLIDVYLKADRLGLHVDRDRILNAIRRGIEWLFNGEEAGVTWVEGSHGRGPAWAYSSAYLEAQGSPETTVTGNVLSLVLLKALWFDVATDVEIETPGGKRKLSDLVTDPEYNLHATVEWLVSQRYRGTEHPEWYGAWPWPARDVTSTTEGAHYEPASIWATAYAMRALEAYLNPELFYGKITKPNGNESVSKTERETVSGGTETEGNKRQEKSKRGVPVLLPAVPPVRRQRQRGGQYRHR

SEQ ID NO: 1532 - protein, 1771 aa, Methanopyrus kandleri
MGADTSVAPVLILVMVFLAVSVPAHSLDIVIFGNAAKGSPEEIRAVEERVKEDLGVDVRIHVHNVLVSWSDQSAPVDFDSLAHDIERSEIVALDNMGPMPTPFAMELSERVLGKPASSMQEFLRELAERKRIVAYVTGDQHDFVILGSGCRRIVDGTAAVVNLGFLFRFSSDLTPVIEFLVWLADPSVPAERLHLSDVRISSAAVYVPGRGWEFPEVSGEALEMSYHRWLHALEGRDRTTEPLWTKVRLSSIPSWVKAIREASSQFFRSLWLPNRRVVVVLDYIDALYKGERDLVEKLTDTVYREVSREFQDVTAIAVLCDGNMVSPIEALLGLKDAGYDIAAVVSLWAFTLDYPKPGTWALEGIDAPIIKAVYPFWANWMDEPQRYLNMNEGDPESGRVGALFEWGYQVIGGPEPEGAFWFKMIALKERDQMMVFPLEDMIEDVARMVAGFLRLRYLPESEKRVAFVLYCYPPGRGEIGASYLDVFRSLVRIFEALAERGYDLGPATSLYRKLAELRREDPKAAEEMEKRLAHALMAASDLVLKNVGPWAKGELAGMVRLYRGGRAEVSVDWNGKSMKVIVDHGVLRWIDVDGSSYVLGTVSEDQLVPVEALERWYREDVVRRFEYYLSLLTGDDPETERARKSLMEWMRAIEEKFGPPTDNRGIMRYGLYYVIPALRLGNVVVMLQPVRGWSGSPELVYHSPDLPPQWQYVAAYEWLRRVFRADAVVHVGTHGTLEWLPGHQVGLLGVDWPHVLLPDVPHVYLYIVSNPGEAMVAKYRSGPILLTHLSPPWGYFKDLGKYGELERELTRYFQMKSFGGDPHVLEELRRRIVETAERLGLLKDVVNMIFAERKEPPPENPKEWAMDHIEEFIDKLHDFLLDLALRNVAYGLHVYGEDVDEDVAVEQAAALASSRVAPVFAYYAGLIDSPDQEALNRLQSDRPDIFAWFKRELRECLRDILRTVLKYPDLTSQLERYVELKDREEYYGEPPDGVEGPGREAKRLFWQVSDRLTILAQEAILRYFHGRRNDPDHEHLLAEAVADLYRIYVHYRDSGRTELEELLAALDGRFVPPGLLGEPMWNTKVLPTGRDGYPIDPSQMPTPEAWDVARKLVDQMLADYYLRHGRWPEAVGVVLWGIHELCTGGLGIAEVLYLLGVRPVWNPDTGQVTGVELIPLDELKVKVGNRWINRPRIDVVVWAALHMEDPLKLLTEAYYLVSHVDEPTDVNYRRKHYLELKPRLVKELEKSGMSPEDAEKEADVIASSGFFAQPPGVYAGTGACDIVEHAWTDVSGTVGLFEDPETALKNFEQRFWEKFRITCESRMAYVYTAEARILTIREGNKVRVVVLRTSTDRVYHAIPSVEAFRYLMSKVDVVVHSVVNTWGLIDTDDFYDWVGGMALYATHAAGHAPEVYIGNAVDPTAARTLTGYQQLVGEVYTKLLSESWWKAMLEHGDYGWSRIVRRIEFLAGWGITVPSLRPYLNSVYTEVFKAVVQWISQAPPRTEYGWAAVVSTIAWFVELARTGVWKPDSKTLAQAAKVLLETMAKHGPATCHHTSPNPALVVYAARVLLEAGYSYSEVKRLLSKVMKWYAKLDNPEIVREIERLTNLVMTRAASERSARAATASRSAATSSSAYTGVTVSRTVSSFTGPGLPGGRGSAQVVVGLLGSVLRGVARGTVLPEIGYWTGPSRYTGHAKAGSRVGKTERSTERESKATQTFTRTSPPSSAPKMIWEWVAALLLTLLFLLVWRIRPTGPRPRATWVTPATVPPVAA

SEQ ID NO: 1533 - protein, 429 aa, Methanopyrus kandleri
LEVHKFGGTSVASEEGLRTLEASAASGHVIVVSALAGVTDALEDFVRRAAEGSADPTPILERHREFITEHLEQRHEEVESFLKDMETLLHGVATVLEQLGRPEERLRDLVLSLGERASARIVAAYLKERGIKAMAYDAWDVGLVTTDDPGNADIVGWDGTRSRLLRDLRSGRVPVVTGFIGRSDRGHVTTLGRGGSDYTATVLAGVLGSRSVIWTDVDGIMTTDPELADAEVVERLSYEEAMMAGASGAGVIHPKAVEAAKNLGVTVLIGNSFTGEIGTVISDSTEPGPKVVASRDDVALIRVSGAKMVDEPGVVGRVTSALGNAGVNLLAVFTTVSEPYINLLVEETALRSAEEALNGLDYDWEVDKDVGLVTVVGEGMSARDVSTFLAACEGFDLLGSAHGVVAVSVVVPESEVREVTRRLAERLLA

SEQ ID NO: 1534 - protein, 644 aa, Methanopyrus kandleri
VNATRGEGVGSMDVEIETEYVVPDTSVVIDGRISRLAEEGYLEGKIVVIPRAVLSELEYQANRGRETGFAGLQELQELQRLAEEGIIEIEFAGERPGLEEIRLARSGEIDAMIREVAREYNATLITSDKVQAEVAKAEGLEVVYFEPITRVGETEIERMMPENAMSLHLKENVPPKAKVGRPGEWKLIELRPEPCTREELEKWAREVIEKAYTDEKSFVEIDRGGATVVQLRNLRISIARPPFSEGWEITAVRPVVKVSLDDYDLSEKLKERLRERAEGILVAGPPGSGKSTFCAALAEFYAEQGKIVKTMESPRDLQVGDEITQYAPLDGDMEKTADILLLVRPDYTIYDEVRKTKDFEVFADMRLAGVGMIGVVHATRPIDAIQRLIGRVELGVIPQVVDTVIFIEDGEIKKVYDVSLTVKVPTGMTEEDLARPVVEIRDFETGELEYEIYTYGEEVFVVPVKGEEEQETASERLAAEVVEREVRRFIGGRAPVDVEVKGSQATVYVPEHMVPMVIGKKGRNVEQIEHRTGLKITVKPLEERRGERPQPAGSPVPEGEGEVIEVESGERFPMRVVDDGEYIRLQLGDKFSGRPVKVFVGDEYVFTATVGSSGEVRVNKDTSVGQRLEEALHKGLKVRAQTIP

SEQ ID NO: 1535 - protein, 141 aa, Methanopyrus kandleri
MSHVPLDPETARKVTSSLNYRFEIGGEPLVIAIAQDAENGDVLMTAFANEEAVYRTLTTGYAHYWSTSRREVWKKGEESGHVQRVVEVRVDCDKDAVLYVVEQEGGACHTGYRSCFYRRVTRDGSFEVVMDRVFNPDEVYR

SEQ ID NO: 1536 - protein, 421 aa, Methanopyrus kandleri
MGVTLMKVERPKGTRDFTPEEMRARRWLERYLLDVFRSYGYEEVLTPTFEHAKLFEEKSGEEILEEMYVFKDKKGRKLALRPEMTAPVVRFYNAELKTRPHPLKLAYIVNCFRYEQPQRGRWREFWQAGVEVFGSDRPEADVEVIELTYRIFDGILPSGAFEVRVGHLGILRGLLEEYGIGEDVQNKVAHLVDKGELDEVKTLLPAEPAEKALAVVTARSESEVEEAVSGKERAERALENLMEISDALREAGVDHELDFSVARGLDYYTGMVFEIHVPELGGGSQCAGGGRYDDLVKELGGPDVPAVGMAIGFDRLLLAAELYDRIPDGVEETRALLIPLVRSGKIWEIAAKLRKLGWVVNVEVSGKHIRKALSLADSLEYDYAVIVGERELKEGYVSVKNLKTGVQEEVPLDQLERAAEV

SEQ ID NO: 1537 - protein, 450 aa, Methanopyrus kandleri
VTSRDAKTYEEAVEIVLRTLVKAERIKPTQYARRLVMKEMNPSREARSVSAGLLYSVLQKRGLLDEVIEDVLEITDDVTELDTWVRNAARIAVNEVVFEDGDPDEVADVLHGLVRRLANPGAAAIVKAFTLDLKDYEPPEPEDELDRLKWEYYHPRWLIERWMEMFGDPDEVVALLEANNRRPPLTIRVNTLKVDPEELAERLQRKYRVTVEPGRFLDEILKIPEGLPIGEMPEWEEGLFVIQDEAAALASAVLNPKPGEVVVDLCAAPGGKTTHMAQLMGGEGKIVAIDVDEVRMERLREIAERMGVLDCIETHLMDGREAPEKLGREFADAVLVDPPCSADGTIPKNPERRWRITPDELERLPKFQYELLKAGAEMVKPGGRLLYSTCSMFPEEDEEVVRRFLDEHPEFELLEVKVGDQGFDMPEACRLFPHRHETCGFFIALMGRTG

SEQ ID NO: 1538 - protein, 307 aa, Methanopyrus kandleri
LRDALGREVRSVRISVTMRCNMACVYCHREGERPGRSELSAAEWGRLLRACAEIGVRKVKITGGEPLLRRDLIEIIENAEGFEEVSLVTNGVLLADYAGDLAEAGLDRVNVSLDTVDRKLYRKLTRSRFSPDDVIRGIEAAVSEGLTPVKVNVVLTSETVKTLPTLVEELADLEGLKLQLIEPMGSIPGFRPAHAEDGLRALGEYEPELERVRTFHSREVYRLNNGMAVEVVKPMDGVMCEACTRIRLTHDGKYKGCLMAPPKPLPRDDFGELVRTLKEYVRTRDDTFEVHQGTSVMGRMRGDVSGR

SEQ ID NO: 1539 - protein, 324 aa, Methanopyrus kandleri
MSAYSLPWYSVWAHPFIAGKAIEEYGAVAGLPAVFLGIVPSPAERWVRGDYKVEYGWIVANYQGPGVVLIRGSHLYVKKPGLVVWGRKVPKVVAVKVGSDEIEVEGKRMTFEEAAKKYGWEKLKYLKKADVGERATLVYELKFTDGRRPMDENEVKKVFGEAAYRRMVEMADYSAVVVWIGKYRKKLIGHAETTMEGIGHLDNLRVVNAARMCRGWNGVIVPPHTWTHGKRQYFDVFEVPGYEKAAHGCCPPARALRDACLDAGLPKPKGIDMGVHPMEYGFHPTEGVVVYNTKPYPILIEIGFKGKPKIGGIIFCNIYALLPA

SEQ ID NO: 1540 - protein, 230 aa, Methanopyrus kandleri
MRITWLGHAAFEVEIDGVNVLIDPFLSGNPKAAKSPDEVDPDLVLVTHGHGDHLGDAVEICKRTGATLVGIYEIAVYAQGQGVENVEEMNIGGTIEVEGLEITQVPAWHSSEIVEDGEIVAGGTPVGYVVSGEEGSVYHAGDTGLSMDMKLIGELYEPEVALLPIGSRFTMGPKEAAKAVELIEPEVAIPMHYGTFPPIEQDPEEFKREVEELGLDVEVVILEPGESYER

SEQ ID NO: 1541 - protein, 248 aa, Methanopyrus kandleri
LRVSPSEGARRVWRAIKTELSEHGPELGRLEEELSAAVPEDAEVKEIRAYGYRRSVGIFRRINRLWILIRGDESVAKDMERNLIDRIVEDVEDPKVRHKLNWALRGALRVTTIDDVRPEPEVIRRVTTLCALCGAASVVLLGIEALAYPKRVVKLLPPAIAVSGAAGCLLPWRVGLLGLADDALDHPRRVTVPVAVSLTLLVLAGLVSSLLLPYLGTGFLGVVIAACVTGFVAARFVELINREVVKVE

SEQ ID NO: 1542 - protein, 332 aa, Methanopyrus kandleri
VSKVRREHGAGGELMESLIKEELLPNLTMRGEGSVTLDDLDDGATFPSVDGEMVMTTDAHIVDPPFFPGGNVGKLAAAGTANDLAVMGAKPVAFACSIVVREGFPIDDLKRVYRSIDGVLSELGAHLITGDTKVGNTGDVDIVVTMTGVGEIVELVRDCGLRPGDKIVITGTVGDHGMAILAAQQGLDTDLESDVAPVWEAVNAALEVGGVTSMKDPTRGGLAGALNEMAEKSGVRIVIEEERIPIREEVRVLSEMLGVNPLEVANEGKVVMGVRPDMVDDVLDAIRSTEVGKNAEVIGVVEEGTPRVEMETEVGGRRIVEKPVGDPVPRVC

SEQ ID NO: 1543 - protein, 133 aa, Methanopyrus kandleri
LGVWHGRSLRKPTGGRIRPHRKKRKFEMGNPPTETLVGEERKLKERRGMGGNVKKGLKFATHANVADPETGEVKCVRIEEVVKNPASQYYERHGVITKGAIIRTEIGLAKVTNRPGQEPVVNAVLIKEEEEEG

SEQ ID NO: 1544 - protein, 218 aa, Methanopyrus kandleri
MHKVEVDVSEDLLEVNRNLAREVRETLDEHNVRAVEVLGSIGSGKTSLIEWIVKEYGDEYSFAVIAGDVVSEYDERRFKDLGVPTVGLNTGRECHLDAHMVQHGLEHLEELTDLNEVDVLFIENVGNLVCPADFPIGAHLRVIVVSATEGEDVIGKHPMMIRKGDVLVVNKIDLADACGVSPETMVRTAKEINPDLEVYLTSIKTGEGMAELAERLLP

SEQ ID NO: 1545 - protein, 142 aa, Methanopyrus kandleri
LHELSVAQSVLETVLDVARKRGAERVLSVRLRIGEFTLLNPEQLRFCLEVLAEGTPVEGAKFEIEIERGYFKCAECGHRWRPEDESLKDPSLHTAFDLSELTELLDLKCPKCGSRAVKLDGGDACSIESVRLEVPGEQHAQG

SEQ ID NO: 1546 - protein, 246 aa, Methanopyrus kandleri
VAGKLVLVGAGPGDPELLTFKAARAISRGDVILKDRLVPDEIIKEHAPEDAEVIDVGKKPGGEGWTQEEINELIVREGSKGKTVVRVKSGDPLIFGRGAEEIEVALKHGMDVEVVPGVTSAIGVPTSLGLPLTHRKCASSFAVATGHEDPSKPENRVDFGALAEAADTLVVLMGARRLREIAREILEKRGNEPVAILERGTTEQERVKVGTLEDAAEGKLKARPPAVVVVGEVVKWWREVLGRETR

SEQ ID NO: 1547 - protein, 380 aa, Methanopyrus kandleri
  MISC_FEATURE (360)..(362): selencysteine
LKAKVRTFRYLWHLLRDVISVPTVKYAVAYVAALLCLGTLGYWTLEGRSPVDAFYTTVLILTGVGCANPPTTPAGEIFTVGLLAVGLGALIHIISRVFAALLRGDVLLRIKESDAMARIERMRDHVVICGYGKKGREIARNLGEHGFEVVVVDKDPEKCDRAFRDGHLAVQGDVTSEETLLKAGVERAQAVALVTDSDETNVFACVLVRDLNPDAWIVAAARSKTGARTLLRAGADEVVRVYEAAGIVIANRLMDPLSFLVTVRHPLEDTFREFREIIRHGGIVVDVRYHIPSLPEPLVKDLWVEDESDVKRRLEMHEDSETREALERLHRMSDDVHSHRIIVRREEDKEKIVEALRRLXXXGVDMTHKEVLKEVFGVEA

SEQ ID NO: 1548 - protein, 228 aa, Methanopyrus kandleri
LRALVVRAPGLERETVQAFKKVDLDAEVVCPVELVSLDRPKISAGLLSEYDAVAFTSPRTVEFLSEEEVKELRRSDVDIAAVGPRTREALERAGLRVDVMPTEYTTGKLAEELRQYGAVLALRSRRRTEDLRRTLESYGVKAEELEMYDLKPKRVEVNPRKFDVVCFLSAFTARCFLENVDPTEIPEPVVSIGPVTTKELRRAGLKVVEAEEHTVEAVAKTALRVIEA

SEQ ID NO: 1549 - protein, 103 aa, Methanopyrus kandleri
VAETPTVKLKGKDRIVVWPAYFDADRSRSEGRKVPKRLAVRNPRLTELRHIAEKLGLNPKVQRDKRYPKRWWDDKGRLIVDKVESKRKTLLMIAEKLKERRES

SEQ ID NO: 1550 - protein, 423 aa, Methanopyrus kandleri
MLRPFSILAFIMVLGGAAHAISVQEYTWELTAINIKTAEGVIKAKFSKPQTVHFLVPEPDYDQVDFGRDVDGDGIPDHMWCGELASLTLYNVAVAKGWWKPIAGNELTPEDLEKREEWFAKTTNIPVEDPQYDAPNASTDPPWFPALISLAADPEHPNAIGVVLYAPLVTVSRWFVVVPPMMHAVVVMGATSNGRYFVVKDCSATQGPDYDWKHDYYLVPAYSLELNISRAIQDVFNPLEQYSSTMPVLFFPIPTDGKLPPGLDEFFQGERTVDVGGGLKVRFYVFLASTLSDVLEICRHLAEAGVPVMCVVKEPFAWLAYQGQVLEVPLVGTHVLRILSVPITAVEIAQPTNSNGAETQNQPTQPKVSNAEGEVEPKENESEANSQASPTSSKRRKIPLVPIVPALPRGTNRGRDSDGQVEG

SEQ ID NO: 1551 - protein, 171 aa, Methanopyrus kandleri
MKRFELDVVLPDKPGQLVKVLEPLSKIGGNVISISHSRDGDRARVHIVFEATEDVAREYSRRISELEGVKILRFGRGPGHETDVVLIGHIVDTDIKDTIDRVNAIQGARVVDVDLEMPDPERESSAGFTLIYEDEEALRKAVQTIEEIAEEKDLVAIFPVEVIQCVRRASS

SEQ ID NO: 1552 - protein, 337 aa, Methanopyrus kandleri
VRQARLFVIGLGAVGLGLMRLLAKKRDAYAREFGIDVRVVGVADSRGVWVKNDLDPAEVLKVKQELGTVAEVGESGDALEIMEDVEFDVLVELTPTDIETGEPGLSHIMKAIELGRHVVTANKGPLAVAYGEIMEAAEEAGVVVRYEATAGGAMPVFNLVRETLKSVDIHSIEGVLNGTVNYILTRMEEEGISLKDAIAEAQSRGIAEADPSMDIEGWDTACKVVILANAILGLDCTIKDVDVTGIEDITPEAIRIAEERGYRIKLIGRADSDGELSVRPCLVPKSDPVAKVRGVMNIVRLETDVAGDIYVSGRGAGPLETASAVMSDVLSIAESVG

SEQ ID NO: 1553 - protein, 175 aa, Methanopyrus kandleri
VMTTATAGAASIYLGGKLASGKEAWKSEGKPLVELGTVLYATGLRLSDSPIPENVALVAFRGLEHVHVYKREIDLNVPGFAQAVKKSVERPDDAFVEALKSMSPTLRYCVDSLLNHDRKLVERFSRDILRVMKGALGSSPTVAEILDVIDEHVEEDEGWIPWNPVRALLEILGWR

SEQ ID NO: 1554 - protein, 145 aa, Methanopyrus kandleri
MIHTTLWIALAGVCLVLAGIALISAIVVEGTIEATTWFTVADLAVCAAAIYVGITGHQFSSLLPTVGLIVATLMAVAHVTYTWIKGILRLVTGRESKSVGERPDTLRAFLTRVLEKLGYKGKVDPGDREAARRVLETCRRWGWDR

SEQ ID NO: 1555 - protein, 134 aa, Methanopyrus kandleri
MADVIAEFLGDGECTVEFEEEKMELVSGKVAEPGHVTPYHLFLAGILACVTMNAGHALEKAGIDAEVTAEVTGEKDWDRLAVTEIEITIKVKLKDDTDPDEARKIAEKGADRCILSRTLGPAIVSKEVVVERES

SEQ ID NO: 1556 - protein, 302 aa, Methanopyrus kandleri
VSARGAPSYEDLRRHVLRYTVDDVKVVRLLPEFGRAEVGLADYDDAAVVRVDGKLVVSSDGPYAFRLVRKSALVHASTDVLVAGGEPRFAVDTIIAPTEKGALEAARRIGRQARALGIEILGGNTMIEDDVEEPKVSLTVMGPLVAPEPITDCGAEPGDSVLLVGEPIHGSFQERMERARRLFDTFPELARRGLVKAAKDVTKGGLVAMAALVCAKSGVGMDLNSVPYSSITRNWDNVLAVVSPDDVEEVLNVCAERGCPVTMLGEVIEEPVLRIAGRTLVDSELMAEIEDHFKTFKNFKKS

SEQ ID NO: 1557 - protein, 220 aa, Methanopyrus kandleri
LDVLDELYLRFREAVEVAGHSEIPSQFLQHWVARTLEDALEVVGDLCPGDVMLEVGVGSEVGTFQDRPRRIDILVRDRVIIETKRPGELNSGGRLEEARDQLLRYFAYLVKERDVRPEDVLAVLTDGKIVVYYEVEKEELVQEGPKKLDRSEFRRMIKTILRRIGEDPRPLELSRTSVELNPTAVVQWIETWKEVRELLERVKKELTGDGRSERPRGPLL

SEQ ID NO: 1558 - protein, 298 aa, Methanopyrus kandleri
VGGLEAFLEILGLVFVGYTLRKVGVFSKDTPSHLNAYVVYLAMPALVFTAMLRAPIQGLLQHLKLVVISMLLSVMCALIGFAVARKMARDRRDAMAVALASGLGNTGFLGYPVCLSTFGEPGLEAAVFYDFGTTLSVIAAYLMLSSRRENPLKMSLRFPPAHAAVAGMCWAALGLHLPDTIRSTLQLLGRSVVPVIMVSLGASLRWDLPKSVISVIPTVWVVKLCASPVVAATIAPSGLDGKVAVLEAAMPPALMNLVLAELLGLRPHVTAALVFSTTVISLATVPTVIYLVSGGGGA

SEQ ID NO: 1559 - protein, 299 aa, Methanopyrus kandleri
MAKPYDVIVIGAGPAGLSAAIHAARAGAEVPVVAQELGGQLTTAPEVGNYPGFPPAPGYELVDRMVEHAETVGVELNVKYSNRVEGIELTDGTFRVLDEECRAVVIATGARPKRLGVPGERELEGRGVSYCAICDGPAFQNRIVAIVGSGTHAANTALFLSEIAERVYVITPDGKLESPDRALIERVLSCRNVEVVHDEVRRIVGDERVEGVELSDGDILPCEGVFIAAGKVPNSEPFRDLVETDDRGYIVVDSEMRTSLEGVYSAGDVTTIPHRNVPSAVYQGSVAGINAAEYALKSR

SEQ ID NO: 1560 - protein, 364 aa, Methanopyrus kandleri
LKVYIVGAGPSGCWIARRVHEMGYDVTVITHPENRLQSERFGHYRVYYGEGLGGSARYSMGNFWFWGPEGLRRPFERVLRDMTCEVRRTPDSVVSNLDIEFEEAAEDVGLEPERMPKSVHFDLCDGCGECLECPRNAKWVPQDELPEGVSVLRDKCIQLEFSGGKATAIVLRSQTVELETDDIVVLCAGCPGTPRLLERSGIDADGPLFVDAYIHVVSDLEAEPGIQMPIVVDMDEYILSPHRTSAYEGKYSIMVKIADELSGDVIGREKPISVRETELFAEGCAVAGEIISRMGGRVRAVTEPSGAHPGGTLSDRVDDRYALEGYDNVYVVDANVLPEPLGKPPVGVILAMAEDFCDKLRRSE

SEQ ID NO: 1561 - protein, 336 aa, Methanopyrus kandleri
VILFSSSLSQYEGIELPTWRYVPPVLLAILLSSASPVAAGVAEMFHSEINEFRESLGLSPLKWSPSLARLAEQHAARMDETNELYHERCQGYNFENVARVPNTGEPTLTARLLAITVLSSPPHRWNVLEGNCEGVGVSISGDYAVLSQKISRASDDAVDVRVEVPPFHGVVSTAHRDDVEKAVLDAINREREQSGLPPLVLDKELSKRVLEELREAARTLSVTCSSGTLVILTRLQNPVEIAEDVLGVLRAVPAGRNFWVPKGRLGVAALEVTEVTMPDGNRLKLGVVWVGINVVEEMAGKNRPRRVPFPSYVAIAIPLCYLITRRQTFFTGRPQR

SEQ ID NO: 1562 - protein, 744 aa, Methanopyrus kandleri
VKRRINVAIAGHVDHGKSSLLERITGEFPDKEEFELSRGITAVMKVIPTEWKGVEIRFIDTPGHSDFREEVGKALLVSDGLVLVVAADDGVQARTEVIIEEANELGLPVVLAVNKMDKEGADFERVVKEVKERGLEPVTAVPTSAKTGEGIEDLLDAIVEHIEPRGWGDPDEGTAFLVVDVGEREGLGSVATGVVRAGTLKPGDELRYEGEVYRIRALLSPDEKRVREARPGDVVLAAMDRAPEAGVLLTETGGYRVENPEDVRPCVRYTVEVDDLRKAREVLEDIERRNLGVETEIIDERRVKISCLGDVQFDKIRSELEEAGIQVEVTSREFEGVKTVGGRAVGRFGPVEVEVLPRASEGVRVFKRGKDRATTKEVTTAHLVAEELGLDGLVVNILSEGESPPEALAEAIAAAIEEAGIFELYPIENVLIEVDNVGKAASLVYKHEGQVIESDESSIKAIVPAPRLNELVSDLMTETSGRARIRLLSSAGAGGPILSVDPGEVNFGIAYIPRRGPCDVTSVKLTGHTRDAKVEELRRTLKMFLADREEPNLVYVGNGPGHDVAVEALGDVLPEAEIVLVDERETTKEAVYRLSSGKLENVRSRDLRDHGVAALAIARRGQLGRRVKKRVDREGVRRAVVTAFGGGSRRFGDYSRLPIRNPEELEEGTMLQVKDPNAITTGLSKGEVVVFHGWREDGGMIASTLTGNRVIIKPRDGRSLKNPRRFFEVFRPVKPKRSSRRGEG

SEQ ID NO: 1563 - protein, 225 aa, Methanopyrus kandleri
VLALFPLAHPFTITSEDLRSVWRWIKTPDVIRVYTDSESLAELLKRPLLRAVRSSLRPPTVSWTGPCPEEDLRRAGAEVEMDEHRPFETSDVLALCTRTFALFLKGVRGGAVGLVGFGDLDDLHRYLVELGYPRTFKATSTLMLRRREVEMDELWKLFPAWAGDDVEPLLRETLKPDVVEDLLEEARSLTSSLGPRVRDLESTPTGRLLLASSQTVWVVKGALNE

SEQ ID NO: 1564 - protein, 154 aa, Methanopyrus kandleri
VILGEYVLRDLFPDLDEDQYQPAGIDLKLDRVFRLEGRGALLEGDDKRLPEYREVETEGGVFELEPNVPYVLELAPELEIPEDTAVLFLPRSTLLRSGVSVHTALGDPGFRGKIRVLAVNHHAAPYRIAHGERVVQAVFLRAEDAGRYEGDYGR

SEQ ID NO: 1565 - protein, 183 aa, Methanopyrus kandleri
MTVVVVVRKGRLVRSASGGVLEADSSSTLILTEEMNLLVDTGGEDPKGLIRDLEPYGVDAVVFTHGHQDHVGNARAIAETFHPEFYAHEREAGSIPVDVDPVDSFDPPEGVEVIETPGHTPGHISVVVEDRIVIAGDACPTPDNALERVPPAISWDRELAEESLRKVLSYPVVIPGHGIHLKR

SEQ ID NO: 1566 - protein, 108 aa, Methanopyrus kandleri
VSVVNLREEARKLEEELSGLLGRPVRVPVVEVFVRRCGCRGIVLYVKGLTLDDIEVLGELLSDALSRLGDGCPVAELRRIGPEVRSLMLLEACDEHPPDEDPSLLPLR

SEQ ID NO: 1567 - protein, 335 aa, Methanopyrus kandleri
VSVVHWSLYVNSAVISAAAALVLPNVPVYVYRHGGDEFTASLVLSTFSITMTITSLASTSLLEGVRAGLPICLGCLGYGWALLPFFVHDSVASLAFARALQGVCSGFSFPANVAAALQLGRSAVSKNNFWSNVGFIVGYLASSHVRDPFGICSVLSALAAVFGLPLLTLRIQSQEDVSAYHGYPVAFGAALALTLASTLPNSAITLLAPKYGGDYGLVIAMMTAVGGVAQLLGPRLGELESTLLAVVLCVVSAALGYSLASVLAAGTATGLMYYAANVYSGGGRGVRAVSTAIGVGYAVNQTIVGAILSAGLDGWRFATLMAAAITLVSLLGVRR

SEQ ID NO: 1568 - protein, 293 aa, Methanopyrus kandleri
LSGVEERLQEVRRGALIGIYGNILLSVLKIAIGHIASSWALVSDGVHSLGDTVSSVMVLLGAKVARKPPDARHMYGHYKAEALAGLGVSMMVTFTGLLLLWESLMRLRNPEPPTSTLPLVVALGTVAAKEGMYRYTLRLAERVGSSALKADAKHHRSDALSSVAASVGIAGALLGYPWADPGAALVVSLMIAHMGLELCWESVHELMDVAPEDELLERVHEIVENTLQDVDFDVELIAVRGRKMGPAYHFDVFVAADPEARLRELDTVRKRIVEGIRREISAAELVTVEFVPM

SEQ ID NO: 1569 - protein, 271 aa, Methanopyrus kandleri
MKVTGDVPGDIVVNIRVVDTFIHGKIKLWCYYDGCLKTRNIETFGSVVVISDDGDWTIINLEDRILLYDSDNGIFEIKLENEYINVRRWDVIKRKWGSVRKVRVNDFDFEDIVPNKYRLAIVGMMEIQLPGNNKKILYSILKDLASIKCEVTENGCSVVAESDGTPPLKLGDIENPIKGIEANIDEEGRIIVSASDKPVYKPLYTGMETVTLRVSPIPVEVKVNGENVPIIGLPVISDLSGTLQVAITKDTILAGFIDGEGAFRWLGVYKE

SEQ ID NO: 1570 - protein, 185 aa, Methanopyrus kandleri
MNVSTTLIFTTISPGTSPVTFIRTLPFTSNLLFLTSISIVSLFENLNAKVFVVTLSPSGSLILSTRTLYFKCFELILANGTLVPKPLLTISSIIKCSDFILFIFKSNPISILTSYSPSEAVKAILSFLLNSYVSVVVSDLAFINTLFSVGTILIVSPMFNLLKIKRSFSFRLRLATLIRTMFAEV

SEQ ID NO: 1571 - protein, 445 aa, Methanopyrus kandleri
MLAVAIAGVRSGCGKTSLSIGLVRALREEGTRVRPFKVGPDYIDPTYLEVAAGLEAFNLDVWMMGESGVVDAFGRYTRRCDAAVIEGVMGMFDGHGEGTVEGSTAHVAALLGVPVVLVVDCRSYATTVAAEVRGFRDMAHEIGTRLEGVILNRVGSERHERLLITALRRYCPDVRVFGVIPRLEDAVIPDRHLGLIPADERNEFAERVAEYWGEVVAEHVDLDALRELEVEGPSVEPSPPPEPERVETKVAVISGRVFTFYYRENLRFLAESAEVVPVDPEKDRLPDVDAVYIPGGYPEVYADNLDDRLMRDLLEFHEEGGRILGECGGLMYLCSEVVDADGDRHDMVGVFDAVARMRERLAALGYVEGRVTDAHPFAPSGSEIRGHEFHYSVVDVREDLEYAYRLSRGTGVREGLDGLVKGNTVASYTHLHIRSDGGVFRGLVQ

SEQ ID NO: 1572 - protein, 204 aa, Methanopyrus kandleri
MVEITIVVDNRVGMVRDPYVARHGLAIIVETDSSLILFDTGPSANTLANNLRLAGFDASFDHVVISHEHWDHTGGLEAVEGTVHRPGGGEETLDDDVVVTRTFEGEYEGRPMPEQALIVGDVALIGCCHFDLEELLGEYEPKTVIGGLHLMGAPEEELERTAELFREYGVREVYACHCTGLSESAYLAKVVGGEPAYVPMRMRF

SEQ ID NO: 1573 - protein, 431 aa, Methanopyrus kandleri
MEERGHSLKAALRNALRGIGGRRHRFVQALAHELVRVLGNVDLVLNRVLRGSTVEDLHPYLRNALRVGTWEIHWRREHPGPVTKAVVDVVKERVGPKHARFANAILRQVERVNPEEVISSIRDPTARFAARYNFPKWYVELVRSAFDSMDELRKFLEACNRRPARYVRVNTLVSDPEEVVRRLKRRGIEAERDPDVPDVLRIRSAETPVIKTPEFKKGEVYPQTKASAAVAHAAEPEPGMTVVDLCAAPGGKTTHLAQLMEGRGEIIAIDMHPKRFGTLKKRVRQFHADDIVETLCMDARDAPDQLGEGIADLVLVDPPCTGTGSVYSKPEKRWDRETTGEPTKWAQLQWELLKVAVRLLKPGGRIVYSTCSITLTENERLIERLVRRYRGLELVDVPLEWASPGVRMPEARRIWPHRHDTDGFFVARVEA

SEQ ID NO: 1574 - protein, 491 aa, Methanopyrus kandleri
MEKVGLRRELTMLGFISTICCTVIGGGVNVLTCMIQVKAPGVGPYVPLAFLIGAVPSLVAGIVAGALSAAVPRAGGHYTYVSRLFDPFLAFFSSWSRFVGEIGAFVAIAIGDVALLAAMCKFWGAPAAGKWLNAHTLEVATLIIIFTWLVNVLGIRIYEAVVDVMFFILLTGFFIVVGYGFAHSPAEYLKAIGGTTALKSLISQAGGLPKDVGTLSAIFSAAATLVFAYVGFETGTQAAGEVKKPEKTVFRGMLIALGIITAYYLLYSAAVYHAVPWEYIYAKAALADKAGSNFTVPEAMAPIMPSALAGYVAFVAAIALLSDLPPMFLSTSRMTFAWAYDGMFPKVFAKVHKSFGTPHWALTVLMVVSVILTWAVGKFLAAVDITTVALLFTYLFICMTGLVWKFVRPDIYEKAPLGDKTKKAVNWLGATGTVLSLFFLGEIAISDPTSFYWWIALMVPGPFIFYYAYNRTVKKLGPEKARERLMTIPPE

SEQ ID NO: 1575 - protein, 195 aa, Methanopyrus kandleri
MTYGISKHLEISGEYRDKLLRGEKRATIRVGRVPGARPGKVVYIHCGGYVYGKVRITNVRTKRVRDLTDEDANLDGFENREELLKALRDHYPNLRDDDIVTIIEFEWVERFDEPILSEHLPYEGHDPIEIAKRALEEDIPLSPRDRELLELLVECGSIRKAAKALGGLGKRDVIRRAVRKAFRLLKSRGALKGRR

SEQ ID NO: 1576 - protein, 203 aa, Methanopyrus kandleri
MSENDDLLVPLNDYLAAGVHIGTQQKTKDMEPFIYRTRADGLHVIDVRKTDERIRIAANFLSMYNTDEILVVSRRYYGQKPVSKFAEATGTTAIPGRFVPGTLTNPEYDGYLEPEVIVLTDPRADFQALVEAQSVGIPIVALCDTDNFTGNVDLAIPTNNKGRKALALVYWLLARELLKKLGRLEEDEEFEYDPEDFEGPPPR

SEQ ID NO: 1577 - protein, 63 aa, Methanopyrus kandleri
VPKVVIDYDACVGVSECGECIEACPMDVLDEEDDKPVVVNEDDCTGCGLCEQACPHGAIEVEV

SEQ ID NO: 1578 - protein, 56 aa, Methanopyrus kandleri
MEDLTRFEIARIVGARALQIAMGSPVLVEVEGDEDPLEIAKREFDEGVVPVVVIRR

SEQ ID NO: 1579 - protein, 381 aa, Methanopyrus kandleri
VSGNPSGALQRVNDLELDPIGLLKDAVATPSVTGEEHEMTRLLTEVLDEHGVPYEVDEMGNVLAGDLSGLVLNAHLDTVPPGDGWEVTDPFDPTIRNGKLYGRGAADCKGGLAAATAAVVQGYYEEMPMGLLATVGEESSSEEDNGTLHVCRTRELEARAGIVCEPTDGRVHVGDRGRITLRVTVRGRSAHASTPEMGKNPIEAASRVVEALSKLRPTEYRLPEIGTVRSDLTVTRIEADGPSNVIPERCEMTVDYRTVPGESTKEVKRRVERVAKRAVPSGFEVSVGIESASRATVVNVEAPVVKAAVIAARKVGLPGKLDFKRGHCDIEYLVHEAGLDAVILGPSGGNIHGPDEWVKVEDVVRCARAYLACANLLPTPH

SEQ ID NO: 1580 - protein, 353 aa, Methanopyrus kandleri
VKPLEHPEVTRAVMVPFTKVAAGILRFADIEIVGICDYREEKVGKTTKELVGDDVPELEIRPMEDLEELLEEAEWLIWTKEVLDEDVHYLKWREAVDEAVVKGVNVYNMGRLHMVAQDPNWKLEAHKRGVQYFDTSDPELYLEYLHYGMKAREEGVNADVVSIVGTGRRTGKFTTLNTARRILEEEGINVRSVGTEPSSLLTGSEAMVIPQVLPMAHAAGTVYGAVKKLDEEYEPDLILVGAQTGVTADPLEVGTGRGGSLAALTILLGSDPDRMVVATRPELLNGLQDVVEVVTLLTGARVQFVSVNGKDYSEEEVREVCERIEDEFGLPAADPIKMEEEFRDLVLDLIAPG

SEQ ID NO: 1581 - protein, 529 aa, Methanopyrus kandleri
VKGEETKQLARKVAEEYGVLLTPEALRELEDEDDAPEVLEKSDEVDLPVFTAQLIRGEVDPDFLEGMEGDVYEILEAEESEEEHEARPRAERPSKLPPAAEVDAEVEILEEARSVSANGSVEGFVAHFRDRLEKLRPLVKAKLDGEWVKDIGELVERARREPGNYCVAGVVTGLRETERAFLLDLEDEAGKVRVVISKPKAPKISEKVRRDVAPGMVIGVKGFVKVERGPVMFVGDRYGEVTLPGEGDHKSRVPAVEDDVKAVFIGDVHIGSKKFREDLFRRFLEWLNDPNDPVASRVKYVIVTGDVVDGIGIYPGQREELEIADIDEQYQRFAEYLELLPDWVEVIVIPGNHDALRQALPQPSLSSSDPAQPLTELDGVHLPSNPALVRIHGELDVLLFHGQSLDDIIIDHPDAEHNPDGVRKAVKLCLRARHLVPIYGGSVPIAPLPEDYLAIRKLPHVLAVGHTHVSAVEVWNGCNVISTATFQEQTEFQKKVGISPTVGRVIVLNMRRDEYENPKRRFTIVDLTG

SEQ ID NO: 1582 - protein, 201 aa, Methanopyrus kandleri
LRPVVWTVRIAAAAIILVAMTASGFLFAVSLTGKSPVDPQLVMRMSSDLARGDYDAFNRDFAMAYLQLTSRLHEGLQTLLEYLGIKAKFIKEEVKKKLFRYRVRVVNSEDVCTKLTELAHVDDIAKGKLMVYADTKSEPNKGTKVLIKAIGYVEKVKIKGETIIIYSTPYYIEAEGMGIYNGDKEVIIDVNTIKLRQVRRL

SEQ ID NO: 1583 - protein, 190 aa, Methanopyrus kandleri
MKVPSSSLAGLRRTVAELCKEVHRAGLTIGGSGNVSVRSGRYVAVSPSGFRLSDVRPRHVPIVDVEGREVLGTTKPTSELLMHLSLYREVGDGVVIHTHSPYLTALVHSGNRPPETEDLRRSVGEIVWVEYQPPGSERLAEAVAKVARKPMVAALERHGGLVVADRPEAALRLAEALEEAARLAVLRPHP

SEQ ID NO: 1584 - protein, 120 aa, Methanopyrus kandleri
MRNGPPKPPFRKIFFKVSEARQQSSSEGGGDLSDYEEKFEQCCTLLEQRIIQDDQIPRNVRRAAKQAIEALKEEGQSPGVRASTAISTLEEVVNDQNTPEYARTVLLQVIATLEQVKDEV

SEQ ID NO: 1585 - protein, 176 aa, Methanopyrus kandleri
LKKIFRNGGFGGPFLMRSGINRDVIEVLMDVYGLTERQATVSVMRSEGMSYREIAEELGITVSGVRNHLEQARMKMKVDNDFQIARIIGKLEMSLGPALVIAIVPVDKSEDVINRLIQEGEGVTEMTGRGGYTGEEQSVLFIITEDEKKVREIIEEEVGREVPMFVMRAPAAFPSP

SEQ ID NO: 1586 - protein, 157 aa, Methanopyrus kandleri
LRGNPDIKRSDLNKMAERLLAGHKMLGIHCPECKVPLFQDPKTGTVSCPICGTEFEVVEEEAKKVKRKAKERRKRAESEEKKTKWAEKKPESGKKERKPEKEKQKRRPRLPGSEDVRKAALQVVTARLKRAAETKDPEHALRELEVAEKALEILKKL

SEQ ID NO: 1587 - protein, 385 aa, Methanopyrus kandleri
LPRKHSRSSKSCKLVFVGVVNRQFSELAIELEFEVGAVQFYDPDDQPGDVISYVREGPGRLLPRFRPPDDQWLIRALEELQPDVIVPTSEFAVEAAFRTSKKLGAEYAGNEPEVVNVAADKLELFNRLSDVLPMPETSEDPSELGVETLVEKPVRGAGGLGVRKVKLDEADPRPGVIFQEFVPGRHVSVTFVSDGSDVRVLSVNDQLIDLRSEYSYKGNLVPSPYHLVPSVREEARRVCEVLVDELGLVGLNGVDAVLNKYGLHVIEVNPRPTAVTECLARVSGDNPIRLHLQAFDGSLPERWKIRGWSCKRVVYAPNTVRVPYLSWTRDRPRPGTVIPRGEPVCSVIASSSTPSGARSMAKRLERVVVNRLERVSSTPPTEGWY

SEQ ID NO: 1588 - protein, 366 aa, Methanopyrus kandleri
LSDELHGIGHEVVLVDIYGTCDEARPYPILRRAFGRFDFIAVPVHCGVDFGTVEGPRVTHHALAGALAARYKQDFLFEVTGVRGKTTTATYLAWILEEAGHRPALSTTDESPVGRPSVTPARVVEVVRETSGPYVCEVSLGVTSAADYAVFTGAPYDYPIAGGSSSALRAKKKTLLESGAEVMIEYREAVKLSLVGPKVHRVHTSDGTVKCDDICVEFEAFDIPFHDRCFGLAAATALTSGLADREDVEAARARGPVPSRLELRRNELVDAHSAVNEQTVRYALSVASDLWGRYGAVIGGTLGGYCEGVDPEAVAEVLQERIERGELVALKLKGELGREVERHLENVDLPEPGPDTPIVRIVRKGD

SEQ ID NO: 1589 - protein, 154 aa, Methanopyrus kandleri
LAEVQREFVMIKPDGVVRGLVGEVIRRLERKGLKIVALEMRQLDRETAEKLYEEHRDKPFFEDLIEYVTSGPVVVMIVEGRKAVKVVRNIIGATDPAEAAPGTVRGDFALDIGRNVVHASDSPESAEREIEIVFGKDLSTIDYERCDEEWLYES

SEQ ID NO: 1590 - protein, 442 aa, Methanopyrus kandleri
LGVKRGGTLSDDGFEGTLEEAVEFLEDLEGTAVRLYVHNDADGLTAGALMAFTLRCLEVPTRLRVLNTETELLKEDLDGPTVVVDMGSGILDKLRNDHPVLVIDHHEISSKPSDNVLLVNPREHGVDGGTEASASTVAYLLCRRVVKVEETCLPKAALVGAYGDNQAGKRGVRGLNRVPEEDGEKHEIIEIRDPAYWVFGRASMTVGEIVERVSGASVREALEARFGDLDVAPVDLSREDEAEIVREHRELLSGEKRKELESKTGRIHVFDEERPLKALRDPLETATLLNACGRYGEGWAGVLIAMGSWDPLQLAKKLRSKHKAIIREALSRLSRGEGITDRESMVVIDGRELGIPHTVVGIVAQFVCEERERVTVGVAEMEEGLVKVSIRCPENSDVDAAEVIKEAADRVDGEGGGHERAAGAEVPEDRLEEFLLELEKLL

SEQ ID NO: 1591 - protein, 149 aa, Methanopyrus kandleri
LARMHSRDRGKSGSTRPPRVAPPSWVEYSPEEVESLVVDLAKQGYEPAMIGIKLRDEYGIPDVKLITGKKITEILEEHGLAPELPEDLLNLIRRAKRVREHLKRHPKDLHSKRGLQLIESKIHRLVKYYKRKGVLPEDWKYDPEALHVE

SEQ ID NO: 1592 - protein, 188 aa, Methanopyrus kandleri
MKVLFATGNIGKYHEAKQILARYGIEVERVDLDYPELQSDSLEEIAAYGARYCAESLGQPVIVEDSGLFIEALNGFPGPYSAYVFDTIGNEGILKLLEGEENRKAEFISVVGYCEPGGRPVTFTGEIRGRIAEEPRGEEGFGYDPIFIPEGEDSTFAELGVEEKCKISHRTKALERFAEWYKNNVAGR

SEQ ID NO: 1593 - protein, 598 aa, Methanopyrus kandleri
LSESNKAIRQPIISVLGHVDHGKTTLLDKIRGTAVAAKEAGGITQHIGASEIPLEVVKEICGPLLEQLDVEITIPGLLFIDTPGHEAFTNLRRRGGALADIAILVIDIMEGVMPQTEEALRILRRYRTPFVVAANKVDRVPGWKSHEDTPFLESFQKQSPEVQQRLEEKVYELIGQLHQHGFQAERFDRVRDFTRTVAIVPTSGVTGEGIPELLMVVTGLAQRFLEEQLKIEVEGPGKAAILEVKEEPGLGHTVDAILYDGIIRTGDTIVIGHPEEPIVTRVRSLLKPKPLDEMRDPSDRFRKVDEVTAAAGVKISAPELEEAVAGAPLRVVGEDEDVEEVVREVQEEVEEVTIETDQEGIIIKADTLGTLEAVVGEFKEKDVPIRKADVGDITKKDVIEAHAVAEKDPLLGVIVGFNVGVTEEARELADEYDVDIIIDDVIYELVEKYEEMVEKRIERERRKRLDELVRPGKIKVLPGYIFRQSKPAIVGVQVLAGVIKPGYPLMREDGRELGEIKQIQMHGEPIKEAKKGQEVAISIEGPIVGRHFEEGDILYTDVPSEHAKLMFEEFKDLLTEDELEALKEIAEIKRKEDPFYGM

SEQ ID NO: 1594 - protein, 271 aa, Methanopyrus kandleri
LIAVLLVLLALPTSGCCEAVWTVYDWGSKGNILKNPVLVQHAPHGPRSEVVYRHSVEGTVVFEFRGGPGPAVLLTAGVHGDEVWTVIALLKLLDALSPTSVIGTVYVIPAVNPAGLAANSRLVDGVDPNRTADIPGSLTWHLVRFALSHRVKYWLDMHCGSGVPRQGALLTDEESEFVDELARSSGFVPLVKSAPRGSIRSVARRFGIDVITLEVPRDAGPSGVERAYHAALAFLRLTGALRRGQSRTPASGSANVTVPVLPAIVPRRRLG

SEQ ID NO: 1595 - protein, 116 aa, Methanopyrus kandleri
LYKQVIVVRGDLKLSRGKLAAQVAHASLGAFLRAKESGAPVEEWLREGQKKVVLKCKDKEELLELHELAKRRGLPSFLVRDAGLTELEPGTVTCLGIGPEREEEIDRVTGDLPLLR

SEQ ID NO: 1596 - protein, 123 aa, Methanopyrus kandleri
MSKPMYVKFEVPEELAEKAYEALEIARDTGRIRKGTNETTKAVEREEAVLVLIAEDVDPEEVVAHLPELCDEKGIPYVYVPSKDELGAAAGIDVAAASACIIDPGDAKDLVDEIIEKVEELRE

SEQ ID NO: 1597 - protein, 243 aa, Methanopyrus kandleri
LKVLALLVLAWLAYAFLGFVKFYATTGCLPLGRLAFVKLHDPDIRPGGLHEMVATNVAHTLGYSAVTIVHNAGNERMYGSWTEKNGVLVWNIAALDPRGNRASVDWHGALRELVFADRLRTATWVHDGPIGGPRFPKNSVIFWHGTVRNGFPLLYGGCGCEPYYYILANYGNVPFAITATVLGWFTPFLISPLEAFWELSHYKRLQYEYLKKVNGIRLINLKNYEGTSATPTDSISGNSVPRP

SEQ ID NO: 1598 - protein, 502 aa, Methanopyrus kandleri
LVGRYTRKLEDAELALTFDDVLLLPERSSVEPADVDVSTRVTVNYRINIPILSAAMDTVTEAEMAIAMARHGGLGVIHRNMTVEEQVKEVRRVKEARDVVQRDVVTISPDESVKRAVELMEKHDVGGLPVVDEEGKVVGIITRRDVGLLSEEEIGELDVKSVMTEEPVVIEEGEDLEERALRVMREEKIERVPVVDDEGRLLGIVTAKDVTELREETEAATDEERRYLAAAAVGPKDPDRAIALDEAGADILVVDCAHAHTETVINFVKEIKREVDADIIAGNIATAEAAEDLIAAGADALKVGIGPGSICTTRIVAGVGVPQITAVAWVADVAEEHDIPVIADGGIRYSGDIAKAIAAGADAVMLGNLLAGTDEAPGRVIRLRGRLYKQYRGMGSLGAMMKGESADRYFKQPEQGGRHVAQTKFVPEGVEGVVPYKGPVSEVLYTLVGGLRSSMGYVGAKNIEEMKKKARFVRITRAGYEESHPHDIAITDEAPNYPISNQ

SEQ ID NO: 1599 - protein, 189 aa, Methanopyrus kandleri
LGELADAVREHLVSATLNAIGLIVVILVIQLVVPPLASLGTMIPGIGVPVNMVLTAVGVVLALYFAYGVLKHVKPMITPAADLVSMVLLGRREEDLRTATYNLVLAAIVLVVAVLLSPLMVSVPGAGAVLSLLVLLVGIGFGGLLLIKAATGFYEVFRDKLEELAENLAERVEELERKASETEETEESE

SEQ ID NO: 1600 - protein, 237 aa, Methanopyrus kandleri
MRPRLLVSPVNRDEALEAVEGGAHIIDVKNPEEGSLGANFPWVIREIMEVVPEDREVSATVGDVPYKPGTVAQAVLGVAAVGVDYAKVGLYGTKTEEEALEVMRACSRAVREFGYDTRVVAAGYADAHRVGSLDPMSVPEVAAEAECDVAMVDTAVKDGKRLFDFLSEEEVGEFVDSAHEHGLEVALAGSLRHEDMPIVRDLGADIVGVRGAACERGDRNRGAIRSHLVRKLAEALA

SEQ ID NO: 1601 - protein, 183 aa, Methanopyrus kandleri
VRSLSVLITALTIPLGVAGQIMTPEEVSELPYNHPVIVDVVAGPPEADSIEAYTRIVWMDPITHERHIEEEVEVRTSNTLLLNVVVASPHRPATCTLMVSFDDRRVLERTVRLQANGIVQESLELDVTSGRHTLSVEVTDGGTEDIVSCNLRVEPSEGNGGENNQVHPFQGLVLWPRRRRRRW

SEQ ID NO: 1602 - protein, 587 aa, Methanopyrus kandleri
MASSSKETMVIIAEKPSLAGTIAGFLRGSWDGRKLLGFGRYRGRRFAITSLSGHVLEWWPKDDPGFRHPDYFPDPGDFELRPIDGKERFLRAVERVVKRYAGCRADRVIVATDNDAEGELIGWEVLVWLKRQGGLDDPECARRMRFSAYTREDVLRALEGALRGERIDPSLAYSALARTIADWLYGIPLTRRLSLCNDDIVSVGRVQTPTLKLVVERERERRKAQKKRRYYWILQAETPIGELRTEEKFKDGRRARELASEIESIRVVEVRRERRSVRPPTPFNLTTLQRAAGKILRISPKRTLDLAQRLYEEGMITYPRTATNRYPSTFDHEELLRKLRNAHPDALRDFQRTGRRSEPVSGKEYDGAHPPITPTGRRKYIRGKLAWRLYDLIVRRYLATLSEDALVVKWRIVAEHPGTGTRFVMEGTEVERDGWYSVYPWEKPRESTMPDVSEGDELPANVNASRRRKPLPRRYSQSRLVAKMKKLGLGTESTRAEIVKKLFDRGYVKRAGSGVAPTKRGERLVELLEDRVPELVSVELTRRIEREMEEISELPPKRARERLERVAREIRETVRRNSKKLKSAKVV

SEQ ID NO: 1603 - protein, 237 aa, Methanopyrus kandleri
MTSTEKARIRRMVWEELEESGEAAPPFPVEGRIPNFKGALVAARRLTSTPEYEEAEVVKVNPDSPQRPVRERALRDGKILIMPTPRLKRGFLVVKNPKDPRRASTIRGAFQEGELTMPDELPAVDLVVAGSVAVAPDGARVGKGGGYFDLEWGILAQLDLVDEDTPIHTTVHDIQVLPPGEIPMEEHDVPVDVIHTPTGTTECVRRYEKPGGLLEDRIDEKIREIRWLREYVSAGST

SEQ ID NO: 1604 - protein, 389 aa, Methanopyrus kandleri
LDARELIDKYHMNTYSRFPVTLVPGEGARVWDDEGNEYIDLVAGIAVNVLGHCHPAVVEAVKEQVERLIHCSNLYYNEPQAEAARLLAEAAPKDLNKVFFCNSGTESVECAIKLARKFTGCTKFIAFEGGFHGRTMGALSATWKPEFREPFEPLVPEFEHVPYGDVNAVEKAIDDDTAAVIVEPVQGEAGVRIPPEGFLRELRELCDEHGLLLIVDEVQSGMGRTGQFFAFEHEDVLPDIVCLAKGLGGGVPVGATIAREEVAEAFEPGDHGSTFGGNPLACAAVCAAVSTVLEENLPEAAERKGKLAMRILSEAEDVVEEVRGRGLMMGVEVGDDERAKDVAREMLDRGALVNVTSGDVIRLVPPLVIGEDELEKALAELADALRASG

SEQ ID NO: 1605 - protein, 300 aa, Methanopyrus kandleri
LGFQIEGVIPALITPFTDDLKGINEEGLRENVSRLLEAGVHGVVPAGTTGESSTLSHAEHRRVIEIVVDEVNGKVPVIAGAGSNSTREALELSTYAEDVGADAILSVVPYYNKPPQEGLFIHFSKIAEAVECPIILYNVPSRTGCALEPETAAKLAEEYSHIVGVKEASGDLDVVQRFIEETPDDFILLSGVDELTLPILAVGGVGVISVTANVAPELMVEMYEAWKSGDVERARELHYELLPLHRALFTETNPIPVKAAVELVGMASSPPRPPLKEAREDTKELLRRELKKLGLLPEGG

SEQ ID NO: 1606 - protein, 70 aa, Methanopyrus kandleri
MGKVRPTFVKRPAREIVEKYEEYLTTDFEHNKKVVEIVARPKTKKLRNMIAGYVTHLMRLKERQREEGTE

SEQ ID NO: 1607 - protein, 92 aa, Methanopyrus kandleri
LNVLEELRREIDRIDECLLDAVIERLKVAREIGRVKAQEGLPLTDEEREKELRERWRKRFKTEGLDPALADIVLASILKVSKEVQRGVIGDG

SEQ ID NO: 1608 - protein, 286 aa, Methanopyrus kandleri
LGEGIAYAAGTVVNAISAKKGCAYALDLTVSVRAELSDSTEIHTDVEDTSLVERCVEVVGEHVGQELNFEIEVDSEIPIAMGLASSSAVSNAVVEALLKELGREPEPFEVVRLGVEASIRAGVTVTGAYDDACASYLGGLVLTLNDQHRVLDIRELPYPYAVILLPGGKVETSEVDVNRLELLAPAAETAFRRAMTGDYRGAMLINSAVYCSALGHEFEPVVEALEAGAAAAGLSGTGPAFVALCETKSDVREVSEVWSDRGEVLETRTVGPERARGAQARNRPHR

SEQ ID NO: 1609 - protein, 87 aa, Methanopyrus kandleri
VKKTIESLGDIGDVLAEEKKNTVELRIVECPFSDVKRELLKRDKVPVVCPFASLVLKATEETFGVRMRTASIDIDEEECRFVMERLE

SEQ ID NO: 1610 - protein, 447 aa, Methanopyrus kandleri
VIGFADRLAEITKKIKGASIIDEDFVKEVVRDVQRALLEADVDVKLVLELSKRIEKRALEEEPPAGVPKRDYLLRIVYEELVELLGGEKTEGLDIDLSRDVNVIMLVGLYGMGKTTTAAKLARYLQRKGYRVGLVGADPYRPAAGEQLRQLAEEVDVPVHVEDVDDAVEMAVKGVEALKDECDVVIVDTAGRDRLSEDLIDELREMAERIEPHEVLLVLDATVGQKAGDHAEAFHEAVQLTGVVITKLDTAAKGGGALSAVARTGAPIKFVGTGERVDDLEEFNPRSFVARLLGIGDIDELLRRTEEMLEEEEKAEDVLEGEFTLKDLYEQLEALSKMGPVDKLLQYVPGMGGGRNVRKISQITEERLKKYKVIMDSMTEKELENPEILNKSRIRRIAIGSGTSERDVIELLNHYRMMKDVIEDIQSGRIPRIGGELGRVIRNVLRG

SEQ ID NO: 1611 - protein, 349 aa, Methanopyrus kandleri
VPSSLFGKMKSVLSKVKEKVAKRVEERAEEAEEAKVKEVETMPEDLKKPTLKERLKRVVKREVTITEADIEDILDELELELISNDVAVEVAESIREELKKELVGRRVKGKSEIPKVVEEGFREALLSVLEPKKEVDLMETVEKARQDGRPAIIMFVGVNGSGKTTTIAKVAKLLKDHGYSVVIAAADTFRAAAIEQLEEHAERLGVTLIKGERGDDPTAVAFNAVQHAEAKGKDVVLVDTAGRAYTDVNLMEELKKMKRVLEPDLVVFVGDALAGNDAIEQAKTFHEYVGIDCAILTKVDADAKGGAVLSISKVTGAPILYLGVGQDYDDLKAFSPEWFVERVIGGEES

SEQ ID NO: 1612 - protein, 157 aa, Methanopyrus kandleri
MAEKKNEQEIQQELQRLIAEINRLQGQMEAINAQIDLIESSISELNRVEETLKGVKELEGDEEVLVPVGAQSFVRACVTDTERVIVGIGAGVAVERTIDEALESIDDQRQELEKARAEAQQKLQELAQELQEKQRKAQELAQQLEGAQRIAQQSGGG

SEQ ID NO: 1613 - protein, 80 aa, Methanopyrus kandleri
MSEVKVFEVRGTFRMGDEPRQPFTRQVPATSEEEALEKVYSDLGSEHGVSRMEIQIEEIREIDPSKVEDPILRRLLGVEE

SEQ ID NO: 1614 - protein, 221 aa, Methanopyrus kandleri
MTVVKASVHGDPNIGAWIAASEEYAVVAPKVPDDIVERVKEALDVEVVRTTVAGSNLVGALLAVNSNGALFPRHAREHEIRVVRELGVEVDVLPSKMNAVGNLVLTNDHGALVHPDLDDHALEVIESVLGGRVVRGELGGVKTVGSAGVANSKGAVVHPGATEEEMERVSEVLGVDVEVGTVNRGSPYVGVGIVVNSKGAVVGEDTTGPELARLEDALYLI

SEQ ID NO: 1615 - protein, 86 aa, Methanopyrus kandleri
VAEVVDERVYTVPLRDAKKAPLKKRAPRAVKALRQFIERHMKAEEVRIGNDVNEKIWERGIKKPPSKIRVRAVKYADGTVEVRLAE

SEQ ID NO: 1616 - protein, 51 aa, Methanopyrus kandleri
LARVKPLGKKLRMAKAIKQNRRVPPWVVAKTGGRVIDNPKRRHWRRSKLKP

SEQ ID NO: 1617 - protein, 117 aa, Methanopyrus kandleri
MTDPELERIRRKKIMELQRKLEESQEKKVEEEREKKALEEAQRRAMLRRILTPEARERLARVRLARPQLAQAVENYLLQLAQTGQLKEKIDEDQLKRILKQVSDATRKEYRIRFKRK

SEQ ID NO: 1618 - protein, 149 aa, Methanopyrus kandleri
VYDAYVVPGSELVERLAEKLKDFEEIKPPEWAKYVKTGRHKERPPEDPDWWYMRAASILRRVYMDGPVGVSRLRTYYGGRQDRGARPERFRKGSGAIIRKILQQLEEAGLVEKTEEGRVVTPEGRSLVDSTAHEIAKEKGYTDKFTSPI

SEQ ID NO: 1619 - protein, 105 aa, Methanopyrus kandleri
VTQVKRLSGKERRALRARAVLLDPVVRIGKKGLTSGVIQEVDRQLEERGLIKVRFERNILRRYDRKELAEELARKVNAELIDVRGRTAVLFRPREGWRRFHGLSR

SEQ ID NO: 1620 - protein, 128 aa, Methanopyrus kandleri
VCKVESPRSGVLLLRRIALERAERLLRLARTVYYEDPDRARRYVELARRIAMKARVKLPKHLKRSFCKRCNTPLIPGVTARVRLRQNRMPHVSVTCLECGYIYRYPYLREVKERRRRHMEGVKDRDAG

SEQ ID NO: 1621 - protein, 411 aa, Methanopyrus kandleri
LRNSNTPERGDSTLHTWLLLWLLLPMTPAQADPTSHYLEVHPDTVPVTPEGSPLVPAYVELTDEGKEAALSLLERLGIPSDEAAVGYLADVFVGESCHGGTRCLVVYNPQDTTVEVRPWEEDRLPLRLPPLRLDDHLTELLLCLPVREQITLQPAVLELGWNLEMMQRCTKAVRLHKFGEPTAVIAVYVPTETAALRAFESLLPDPRNVARAMLERLSSEVRDAIDEYLVRDRLERLVKSRLGSDVYDRVREYFSSMIHLTVSKIEELYDERVLPALIEWCAAIVRYVETSLITAFALLYPDNPSADVLERRVAVYNSPYFQILRDWLLEPSYTAWKSVLCDLAVTVADSIFEAARPVLSALRLDSESSRTTLEEITKSAVKNFIEALGPCLRTVLELLLLDTLMGLAWAC

SEQ ID NO: 1622 - protein, 189 aa, Methanopyrus kandleri
LSKDSVRAASTGHTHGAGVGLLRFLQRRVLIVGCGNELFGDDGFGPAVIKEIERRGWEHPDVEILDAGAGAPQNVFSLIDEDSKVEYMVVVDAVDVGAEPGTLLEFGPEDLDPNCRIVPVDAHGWSIESALLDLNERIGIDFRILGCQVKELPIPEVQPGLSDPVRKAVPKAADRAIELAERYLGEKTR

SEQ ID NO: 1623 - protein, 161 aa, Methanopyrus kandleri
VIQGWSALRRGRLNLEAVIRALAAERMASELPLVEVAARLDVDPSTVSHYLSGDYPSEETRDKVRRVVEETPPFGLWPQLREALGVDVAAEALKWVMGPRTEAEPDVDDERCLACGRCSEICPSPDGECLGCGECVRACPSGARSLSVRYRGLVYRVFSPK

SEQ ID NO: 1624 - protein, 519 aa, Methanopyrus kandleri
LSLLKLVKGSLTVLVGSLFLRLGGYVYRLLVGRLLGPDGYGIVSSTMVIQTIVMFLATFGVPPAVARYVAKYHALGEGTKVRQFIVIPTLVLVALSTLAALILALTAPYLASWYFHNPRLYTPLLIMAIGLPFAAFASCVRGVFQGFQDMRRYVLTQFVEQGTRVGGAPALILAGYGPAGAVFASATLAYATSGLYGAAKLRSEYLPKIPREGEPLPSDRVAKDALTFGLPVALTGIADMIQSNVDLLAIGYFLGTLWVGYYDAAGPIARLPTTLCAAVATALLPAASEAEALKDERTLRQYAHIAIKTMWTLLIPVAVLTGALAEPLITLFFGPAFRPGAQALYVLPTAMAFIVVFRSCASLLQGIGRERLPLVVLSFSLVANVVLNAIMVPKWGIFGASVATAISDWLAMILIVRAVMVHAKAHLKLRWALVPVIAGVAAWLTTEWSMLFTNGALLKLLLGSAVGTLTYSILLVVLGGVSDLEWELLEKGARRVGSPGIVRVVRLARSLDILGRIKP

SEQ ID NO: 1625 - protein, 295 aa, Methanopyrus kandleri
LSEREQLIYLNGELVPREEAKISVYDHGFLYGDGVFEGIRAYDGRIFKLDEHVDRLYDSAKAIMLEIPMTKEKMKEAIIETVRANELRDAYIRVVVSRGEGDLGLDPEKCPEPNVVIIAEPMEPLYGDLYEKGIEVITASVRRIPPDALDPKIKSCNYLNNILAKIQANLAGADEAIMLDHEGYVCEGTGDNVFVVEDGTVYTPPEDTILRGITRATVMEICEELGIPVEEKRITLGELYAADEVFLTGTAAEVAPVRKVDGRKIGEECPGPITRRIMEAFRELTKKEGTPVYEE

SEQ ID NO: 1626 - protein, 353 aa, Methanopyrus kandleri
MAERIVREVLREARRRGVSVSDLFSSEGWVVNEITDRISRVLGSVGAPSEDVRESILEETSSKLKSPTTYLSSIAETVSQVLPWGEEDADALPDHDFSEKVLDHLLEGAEEFVCLASPWVSSPKDLVEEGVRSLRGLSDRDLELYLLVAAGENEREVLLEWASLGFEVREAEGRREGDLGIHCKVYANEKLALGASWNLTVSSLRRLRAMREVHTINPKADDCEVCNANYEQLVSEFNSQWSEAKQRFFRDEGLKGPAIFEVRWDGDRPTEVVIYRENGERWFTVELEDNHEGFVFNEREGLPVRRGVPRVHRFDLRGSRRRGQDRLSLRRTQAREDPSGASGCRRAGREMER

SEQ ID NO: 1627 - protein, 97 aa, Methanopyrus kandleri
VRWKDNAKKYKHQLTGRPYDGALVVWGLDPDPRSDFYVAGGKLLVIRCEESGGSITVEFVDAADPGNLPDWVSGSVDLGWLFDRSSGEGTPTLFVYD

SEQ ID NO: 1628 - protein, 448 aa, Methanopyrus kandleri
MENQLLAVKALVLVETRGMPIPEAVERTCRDRPIDVRRSVQAFVYETIKRRNLLDELVAAGSDAHPEDVRSPYVRQILRVGTLEMKIWRNPPPAVTDCMVRIAKRLVGSKAGAFVNAVLRGVERVSVKDVLEDRPWTERLALKYGHPEWFVLYVLDLFEGDRSRVELLLRANNRVPPQYLRINRLKLDPLVAGDVLEREYGIVTEPTFLEEVRALVRGRGYGSRAWREGLFDVQDLASASASAALSAEPGETVLDVCAAPGSKTTHTAERMLDEGEVWAVDRSEWGLRVLERRCRRLGITCVRTICRDARGLTVDDLPDVPDRILVDPPCSTTGVWNRNPDSRWKPKPLERFAERQWEILEPALRIAEEHGCTLVYSTCSVSWEENEAIVKRALEEFDVKLVDAGVLGSPGIEEFRGERFSGYKKVRRYWPFRHDTAGFFVAKMKGKG

SEQ ID NO: 1629 - protein, 246 aa, Methanopyrus kandleri
VEVIKVGGEVLDRVEDLARVIDDSILVHGGGPEVSDVMERMGLEPRFVRGLRVTDRETLQVVMMVLAGLVNKRLVAELRSEGINALGLSGVDGGLLIAEKRSEVVDGEEVDLGYVGDVKRVNAELLESLLDAGYVPVVAPLGAGEDGTVYNVNADTAAGAIAGAVRADRLVLLTDVPGVLEDLDDPETLIERVRPEDVEELEEKGIVTGGMVPKLEAAKMAVEAGCREAVITNLEGLLEGRGTIVR

SEQ ID NO: 1630 - protein, 104 aa, Methanopyrus kandleri
MPRGRDHEPGRVARGEGNHREVAAHLGEKIEKYISKLPSVLNECKPRDRAGERLLDLASRYFYDARYFLDRGEMVEAFTCLSYAWALLRAGAEVGVLDVPEDEV

SEQ ID NO: 1631 - protein, 207 aa, Methanopyrus kandleri
LVRPVSVGKHGGVSVEVLHPSDLPPQLTSLCKIKINGARVISRRSNIVAFRGRPSLEPLNDLDGFMSIAARESEVVMVGDPYLRVLAVEEGERIVVNTDRLLACLDFETIELKNDEITVVECVGPDIVVLACSSPVVASLKLEGDTAHVQAGSILCWWNIHTENVGDFLRLTGQGHVMLSITKKPDATEKGASTEKTTAPRKVSSWI

SEQ ID NO: 1632 - protein, 211 aa, Methanopyrus kandleri
VRVFRVGGKGITPSPDCNCYLLAVGDEGILIDLGASGEVIDRLPGNVDVRYALLTHSHFDHAAAGPDALEAGLEVGVHRAEAEVLREGDDRLSAAYLFGRPMPAYEPSFTFRDGETFDVGGEEVEVLYTPGHSPGSCCFLLGDLAFTGDTVFGFGPGRWDLPGGDRKKLCESLERLLSTGVRSIFPGHGYEVIGEAVPAIEAALREAEKDI

SEQ ID NO: 1633 - protein, 284 aa, Methanopyrus kandleri
MRPEELALKAVREALRRTVFDPDAWTHVTVVSDDALHVHILTNQRKNVEGKGGRNRQYLEGYAEGYLAAHGHDVEVRVSVVGAGLRDETEEFRYLPLKRALKEGVIEEGSPIHRVCERLGIGYVVLGAREIVGPNPALVEVVEGLEGERAVDVFTGTGTGALAAVEAGFEQVYAIDVRVHPEVRERLESEGVEVIEADFRDVDLREFEPIDLLTADPPYASTLEFLEKLSEERPRVDTAVVCHGFSSWTRAVREIRGFLIELFEDVEPVSKYGHELSVCRRLRD

SEQ ID NO: 1634 - protein, 204 aa, Methanopyrus kandleri
LVRSHAPIPYNPVERIRALRVLREVHRRRKKPSLEVTYRTVNGSTCGPYYVARWRRDPRHKHGRTLYLGKPENESVSFVEWLVSLDRREVLELARHLMRNLRSVLKTLLTEVSDLPYKKARWVLARGLALAFDARPSESPRIRDLLEELPDRLESFAVRTLGGWPAHYSSYLRKVIHHRGKSLDEKHEVPDVGLEFQRWKLQRG

SEQ ID NO: 1635 - protein, 220 aa, Methanopyrus kandleri
LTSSFYGEPEGLRWLEDDLRALGLSPVRYEYGDRDAVEVAVHSEGFAALLRGLGMPEGRKTGRVHVPGLVRRGPDRVALEFLSGLFGADGWISARENRVEVGIAQASPWGESSEFLEGVSSLLKRTTGVYARVLEAGSYETSVDGRRSVFGLGFRGEHVERFLTRVPFEYSVRKRELGLWAGAYLRYRARGGKDAFERFVEERCLPGGLVLDRVVDVERR

SEQ ID NO: 1636 - protein, 367 aa, Methanopyrus kandleri
LNPELILARLFGVLLGRGTFRDGDRPRVRLSVPIGGASELLADLSRLGVNPSVRCGKRWTSVESRDGRLIGALIMAGASADPVDGIPNWVFEDPEAARELLSGLYSVRGRVLGFDGSRPRPVRLELRARADRELDLLSLALDVCRLLGSLNVDAEVVGLSHVSSGHYRYARVEVLIRGRRDLRRFLSEVEFRYNPEQSERARRMLRELARRETQLSTKWPARWGDVGVSDSGDEGLVLRTELGFEIAGPADMWVSSRNKRRLGDLKPGDRVVLYPVGVPPAADRRGTLLADVDAPEGARRFLRDLDLLPLRWEDPALPTLTRVLGYAIGDGHLEPDVVVLRGAGGTAVARGRSARARPLAGAVRVRG

SEQ ID NO: 1637 - protein, 359 aa, Methanopyrus kandleri
VGCPGLYLTKEEERILDGEEGELKAKLMEVLVKLGDVFDAERLVRPASVHVSGVSYGTIGDAGLRFLRKVAEAGLRVSVPTSVNPCGICLDGNLPVDEEFERKQREIMDALESLGVASVYTCVPYQQGFQPSRGDLLAWGESSAVFVANTYYGARANREGAPATVAAAVVGRIPEYGMHLDENRVAEYEVVVEFEPRNDFEWSALGYYLGEALDGIPVLKLPTVPSLSNVKYMGAAAAASGALAMAYIPGITPEEPRMDCPERIEVEREDVFDLVEERFGTEREGFAFTGCPHRPDGEIPRFDGCAICCPANATLDGYRLRGTCPVVAPIEDVHDVVFTDSLKAAHYLASRVEVNVGPL

SEQ ID NO: 1638 - protein, 279 aa, Methanopyrus kandleri
VALEKLADLLDVRNENTRHSYRFALRRLDEFLRRILEDEEPEEWLEKAPDEEILEVARELRNLLVESVRNMELDHEMGRLCWYALTKALRAVGRDPLLVLTVKAYGSPASPEMTEQDAREILELVDLIEEWAKENKDASWWAPFRIIAESGISVMDLVRMRWADVCPGEPWLEETPDEPRLRVEKPEETIEFPITERGLEALRELAEWAGVDPTEEPERPILMSEDDEYHTDAQRMDSWRARLTYRWREAQRSVLGESEWRIKDLTRATRILRLPELRR

SEQ ID NO: 1639 - protein, 293 aa, Methanopyrus kandleri
VSELNVVELFHGDLYSIAYRAELDKFLPMIGRARITPAELTLAGLLELGYEVEVTTLEGKSLPGRRRIELADEVKGVVTGRYVEELLDSDRVHHLRLSARCLGAEVKIRYSSDWKVEIGGYEVDPSKLHKNRALVKLLEFVSTREPSFTDLVVDLGAAPGGWSSFAAQMAENVVAVDPARLEDRVRELENVHHLRITAHEFVLPEMIGVGFPGEKVTLLSDVYSGNPEDDLYAVLRLLERLENDVVWGFVKVAPAEDDVLEWFMEEIEEAGFAVENVNLESASSNETFVYFRE

SEQ ID NO: 1640 - protein, 132 aa, Methanopyrus kandleri
LKRSPRDSVPYVTLDGSLIYEVVRPEFSRVNTVSLAVAEIPPGESTVPHYHLDFDEVYWVLEGRGIVHVGSRSLEVHPEDCVEIPRGSVHWVENDGSETLRILCVCSPPYRHETTVTLGSKRTSRSSSPTRD

SEQ ID NO: 1641 - protein, 463 aa, Methanopyrus kandleri
MIHGNRGALLPIPRIVLAGSSSACGKTMITAGIIQALRADGYEVQPFKVGPDYIDPSYHWLASGRPCGNLDTFLFREKHVRWLFEHRCEGADLAVVEGVRGLYEGIGAVGVRGSTYHVSEVLNAPVVLIVDARSLTKSVAALVKGYAELEGANIAGVILNRIRSEVHYHKVRRALVKYTDVKVLGYVPRDRRLKVEYRHLGLVPTPERLEEMRERLRTVAEVISEHVDLDALIDVAEAAGPLGPGERPWEVNPTKCRIAVAKDEAFNFYYPENLEALEENGAKLLEFSPVRDEDVPPDADALYIGGGYPELFARQLEDAESTRNSIRELAESGAPIYAECGGFMYLCRELRWNEDRYRWVGVFDVAVEMTDRVQGLSYTVARAVDDTPVTRKGETFKGHEFHYSRLVRPEGLESAYRIIRGQGWRGREGFRPKDLPNVLGTYVHVHAASHPTFATNFTGSTGS

SEQ ID NO: 1642 - protein, 54 aa, Methanopyrus kandleri
LEERDEGDYVVVKCRECGHVIVRRKVGSAGLTTETLGIAVAAAVTATAIASTLV

SEQ ID NO: 1643 - protein, 418 aa, Methanopyrus kandleri
MTVVFAPRFARRAPSRTRGSEAMEFDVVVVGAGPAGSVAAWAAAEAGCDVLILERKAEIGVPKQCAEGISAHGLEHAGIEPQDEWIATEISRALIYAPNGKEFEVPGDGYVLERRVFDKWLVVRAVEAGAEVELLAHARRALLDEGRVVGVEYEGEDGVHEVRARIVIAADGIESRIGRTAGLVPSLKPVEMCTCAQYEMVGVDVEEDATHFFVDAEFFPGGYFWIFPKGEGRANVGLGIRGSESEPGDALKVLNRALEDHELISEAVADAVPVEVNVGGVPVCGPVERTYGDGILLVGDAARQVNPLTGGGLHTSLVCGRIAGEVAAEAIEEDDTSASFLKRYQDRWEEEFGKTFKYALKASKIFSEMSNEELNALAEALDREDILRLVKGEEVVKVAKKVISRKPSLLKYAKHLMK

SEQ ID NO: 1644 - protein, 436 aa, Methanopyrus kandleri
VIDRLREALKRFNPCDSCLGRAFGYGLTGLENRERGRAIKLYLGMRAHLEGEEETLELLARSGLEEAAAVLDDPPEPEPCGVCRGVLDKVDEFAEVVACELKDLEFRGFVVGSRWPEEIRKAEKELWETLGVEGEPIKREFNREVGKRVEHLLDVRADPRNPDIEVVFDFRPSLEDPKFEVHVRPIYVRGRYLKLRRGIPQTKWPCPRCRGAGCPNCDFTGKLYTESVEELIGMVLKDAFLAESHKFHAAGREDIDVRMLGNGRPFVMELLYPKRRNVDLKEIEGEINRKVGDDVQVVGLEYGDPEDVGKVKDLSERSRKRYRAWVKFGKPVPEDKLREVLKGLERSVIEQRTPRRVLHRRADKVRRKRVHEAKLIEYDGDRAVIEFLCDPGLYVKELISGDAGRTRPSLAELVEVEAECERLDVIEFLDEGGDRS

SEQ ID NO: 1645 - protein, 427 aa, Methanopyrus kandleri [sequence omitted]

SEQ ID NO: 1646 - protein, 468 aa, Methanopyrus kandleri
MTGGKRGWNPASIDPRLYQRTGFLIVATLNLVIVGLVAAVGIKVIVEKHYPMVVGAIAIPIVVAPLLLPLLYLLRVLKREKLVVVGEDRVLIIRGKDVTEVPVDEITGISVDFEFKRRRRKMIILTRSGHVELPFHSKRLMRDLQRLLEERRASEVDKETYARAGADRVATVLCKMVELGRSPVLHEAQGSVKAVWPGDSVELGREDGWAPRWMYWFLCVASLPVKAAKRSLREDPVDTVIAAEEAAKGQSLASSFNKILRTGPIVSALLVFLAVVRGVLKYWGPKALGVFLFTAAPWILATSVLSFLLNNRVKTVELHGVRAFFSLVAMVSIFSGLGTCLHGSLAETAMLRKSLPPSAHLTAVIELVIAMVSLVPLVKTLRWVDPRGAVRWCMALRATIREDRVILFSVVFALLSVFFAGSAASPGLWWVTFPIATATPVLWTVYFLSWSKMAREVVSKVWIPESES

SEQ ID NO: 1647 - protein, 451 aa, Methanopyrus kandleri
LCGVSGCYLLKENEAGVYNYLILHANQHRGQESAGICVYDGLRLVGKKGMGLVTEVFDRPDLRKLSGPVGIGHVRYSTTGASELVNAQPFKVGYSKGELALAHNGDIVNSEELRRELVSDGHAFVSETDSEVIARLLAVALTETDDMFEAFEDVMERLVGSYSLTVITSHGDLIAVRDPWGFRPLCLGWDERGFFVSSETVGLDVLGVEERRELERGEVVWIREGDVESKVVRRERKAVCMFEFVYFARPDSIIEGRCVYECRKCMGKRLAEEAPVECDLVVPVPDSGRTAALGYAESLGVPMEEGLIKNRYVGRTFIMPEQEERVRSIRVKLNPIREVIKGCSLAVVDDSIVRGNTSRQIVEMLRDAGAREVHMRIASPPVVSPCYYGIDMATKEELIAADLDVPEICEKISADSLAYLSLEGLVESIRLKKRELCVGCLTGEYPTPVPE

SEQ ID NO: 1648 - protein, 1240 aa, Methanopyrus kandleri
VNRAREELDRYRETLEEVSSRFVDVATKARQRREDPKPEPEVMLATSIGERVEGLLQVENVADRLEELEEELGDREEATFRIVEEVIKGELKVKGDLPLHKRIDYAVRIGLAVLTEAVVSAPLEGIAAVEIRERGTGHRVVDESEPPHEEPKLVCTECGKEVDPENCYLAVKYAGPIRAAGGTAAALSALLADYARQVAGLPRFNPDDFDHDLVGRYVEEVVTYLDKVGSFQYNPSEEEVELVAKNIPIEIDGEPTEEVEVQGHRDIPHLPNQLRGGALLVICEGICQKAPKLIKRVEKYGIDGWEFLEKLVNKGSDDEEEGEEEKTKIKPNDKYMGELVAGRPLLSHPSAKGGFRLRYGRARNTGFAAVGVHPSLMYVTKGFIVIGTQLKVERPGKAACVLPVTEIEPPVVKLRDGSVVRLDDPREAKELVEKDEIEEILDLGEMLVAVGEFIENNHPLVPPAYCPEWWVKEVPDVVKVIGLRKNLPNDVFEKLKDVPLKRLVKEASRLSGNGNNLDGFLNGPVKVARSIVELVRKEVIPRLSSPERMSVEEAIELSREYGVPFHPKYTFLWHDVKPKDVDELREALEVAGSEWGNLRVEFENDGEIKRILEDLLVPHRLEDDTIVVEEPWASALLAQLGYDPESGEFREQDEDLDYLLDYLVIRDETCRYVSKLAGFPIREKAPTRIGARMGRPEKARERKMSPPPHVLFPIGIAGGNQRDIMKFHRGESEDTDRVEVCYRICPECDRLVPYRVCPFCGTETVQYCNRCDEPADECDCEEPDPVVRADIERNDDPYSSLPVRELVRRAEEEVGTTDTLKGVKGMTSRLKMPEPLQKGILRAKRDLFVFKDGTLRFDCNDCPLTHVRLKEVGLTPFKARLLGFERDINGDPVVSEDQVVELYPQDVVLPRKAAEWAVRVCQYLDDLLRKYYGLEPVYGVEKPEDLIGHLIVTLAPHTSCGVVGRVVGIADINCWYNHPIINAARRRNCDGDEDAFMLLLDVLLNFSRLYLPDKRGGLMDAPLVLTAVVDPYEIDDEVWNMDVCGDYPLELYRKALEYADAGEAEELIERLEDRLDLPRGLQFTHDTEAIDLGPTVTRYSRLEKMEEKLEEQLDLARRIRAVDESDVAKIVLDSHFLPDIKGNLRKFGRQKFRCSRCNAKFNVPPLSGKCPRCGGDVLLTIYPATATKYLEPAKRLVEEFGTHDEEWRTIASEVELLEEEAKTLFGSDHSVSLKKFFGET

SEQ ID NO: 1649 - protein, 318 aa, Methanopyrus kandleri
MRRELIERLESRLDRREIEKARRDSHARRRPRPCGITVHPGHGCPRACSYCYIPEMGFRFERARPYRLSGEGMVLALLYNRGFEPGREGTFIAVGSVTDPFLPELADKTLEYLRTFSRWLGNPTQFSTKSAIDGEVAESLARLELPLNGLVTILTPDREKASRLEPRAPRPEERLETITELSKAGLTVDLFFRPILPGIVGLEEAEELFRMARDAGARGVVVGGFRVNEGILSRLKRSGFDVSEIVNRANRPIPKGRKQVYVRTGDIKERLLRIAREVGLTPFGAACCACASAAQVPCPNRCWEGPFCTECGNPACPV

SEQ ID NO: 1650 - protein, 466 aa, Methanopyrus kandleri
LRLYRRRDPEPQSPSSSEGGLPLPSLALVVPLISISALIVAALRGWGLFRASSLSLALYLIASTFTPFTVQVPYVRVVDSALKGVEILAVVLASLTLVEMMREDGVLEDIVHILKETCQLRGPCLVGLSVVATGAFESVASFGTPATLVGPLLVEAGLSKTTAAAAALVGHAPFGVFAAFGVPILVTSGVSGIDPKKLSFDVALCIAPSLLVLPYAVAETADLRVSKVLLTTMGIMTTASLLAVWWVASPSIVGPLLVLGVASGFLWYLRVAGEEARIKVSNDTIKGMIVYGLVVVGIGVVKALDVKWVQPWMLLWVAVLLYATPRWTRMVGALIRVLRKTWEELLSIVLLMVLGTLIAHSELPSAIRPYAGSPLVTFLVGFMGEMVVGSTTAVMATFASGTPYPEITLAGAACAAAACPYNVAVAAAAVRCHEKRVMRRSLLGSMYLTVPTLAWCTMLWIWGAMK

SEQ ID NO: 1651 - protein, 280 aa, Methanopyrus kandleri
LKEFAVALHDKAPIYGLRIDNVYVSYSSANGVEYLYELSDNELKLLQQYRRIGEVPRGFRVCSELGLDTLIWIAGRDGSSYYELKRILLTENSTVRHVVYVNVSPNYLVTDDPSLPGYFSVNCYWNGPDKIWYPYYYLKLLGVEIVNVKDVYPTYSSTIQLVSLVDILADAALKALTKAVKHELVSQQPPEVKAEISHLLSALEGPEPPSPSALEEVMRKGGASEEFIESVLEGLRKYWSGSTGIGTSQRSPVNIIYTVLVLTLWVRRRPGGVARSRARG

SEQ ID NO: 1652 - protein, 235 aa, Methanopyrus kandleri
MSNYVIRLENVRKVYNSGSVKVEALKGVSLGVKNGEFLMIVGPSGSGKSTLLHIMGALDTPTSGRVEIAGKDMTNLSDEELAEIRNKYVGFVFQQYNLIESLTVLENVMFPMTLAGEEDEERAKDLLRKVGLKEEHFDKFPSQLSGGEQQRVAIARALANDPEVILADEPTGQLDTKNSQRIMKLLEKLNDSGHTIVMVTHDLSLVRWADRVILLRDGRIEREMSPEELDAEVLD

SEQ ID NO: 1653 - protein, 370 aa, Methanopyrus kandleri
LITIKVAIRNIARRSVRSLLTILGVAIGVAAVVGISAIAKGLQHDVKVAISGSASLIVKSKAAPDPLSSVLDESIEDEVRKIPGVKRTVAVWFNNRMITVGRQRQPILIAAVENRGYELVVGSKIEPIEGHLPKHGEMAFGSLIWRKLRPKVGETVDLSGQKLRVSGAFKTSSQLANMCAITTLDSVNKIRGKSISCVFVQTSDPKRVRKEIESRINGVEAITTSKAVQGMLNNLRTVELAAIALTGIAGVVGALGVANTMLMSVIERKREIGVMKAIGATNRDVMKLFLLESIILSLAGGIIGCVLGMLGSQLLVHILSYIKHQTVSVLITPEVLGLGLALALAIGVVSGLYPAWKAAKVDPVEALRYE

SEQ ID NO: 1654 - protein, 238 aa, Methanopyrus kandleri
MITLDTETTVEDLSESDVEGRIIYAPCKGCSPDEEVPQEVVRATVHRKGPDEKGVPRFVANVLARCESCGTVNPVRLVFYAPKKVKVTISRYEESECKEVEMDPLEEIEVGDVIEVEGERVEITNIATHEEDSVKKAKVKDVVSVWGVSLDIPARIGVSINLPSGYTISEKVEVDRDEEFTVGEIYELDGMLFRVHAIKPEGRPTVKREGESVKAEEIKRIYGRPVRRGTPKKSLESI

SEQ ID NO: 1655 - protein, 140 aa, Methanopyrus kandleri
MEITLKARGHENVTGRHRSTFEVTKDPEIGPTADCIIGVRADTACADLPEDFKLMLRRGARVEVILRAGGTEDRVVGVGHPRMTLQDGRSMVFRTSDYIDDRTVLIRCNKAARDLSRDLVRALKDPETVLMVEMRVLDVR

SEQ ID NO: 1656 - protein, 204 aa, Methanopyrus kandleri
MVEILYKQPKGKRAYEEYALILDFLPYGRAEEPPHKRQPVAQAIGKDFFVLLELAPKEGAFLELHEEVYVGRGKRDKIHHVNRRLRYDELTATAREELPHAVEKIIEDNEEDFVRFFNEARPITPRLHQLELLPGIGRKTLERILEEREKEPFESLDDIKERVKGLRMHPRDMIKERVLAELKGETRDKYRLFVPEFRGGRKRR

SEQ ID NO: 1657 - protein, 129 aa, Methanopyrus kandleri
LPSISLQARERSPTNVHEARKVVEKVLKERDPELTYDQREAVRYLKKFGSLEPEDLEEAKEELRSILGDLTTNERTVEILVNKILEVQPRSEEEIKVLLESAGKRLLRRADEDVVRAILEVSERIAEEE

SEQ ID NO: 1658 - protein, 102 aa, Methanopyrus kandleri
LVRRSKGFRSRTRKKLRKKPRERGLSPLGPMTQEFEEGQKVHIVIDPSVHKGMPHPRYHGRTGEVVGRQGRAYIVKIRDGGKEKKLIVYPEHLKPQEQPELQ

SEQ ID NO: 1659 - protein, 137 aa, Methanopyrus kandleri
VVVVVYHRPFSHFRVNHVALIAGNLGAKLLVYSEPKSRAALDGITQVLEHPEERGRVPVMVVDDLDDALEVVDGRVALLDPSADEGIKKLKPSDVLLTVPVELLEEIDIEPDLTVGVSAPVGELAALAVVLYELGGA

SEQ ID NO: 1660 - protein, 406 aa, Methanopyrus kandleri
MYENISTMDDFEFENKWVLLRIDINSTVIDGKIEDDERIKRHLGTIKELMEHDARVAILAHQGRPGEDDFTTLEPHAEIMSEELDNFEYVPDVFGPTAKKKIRSLEPGEVILLENVRFYSEERINRDPEWHARRHLVRNLAPLFDIFVNDAFAAAHRSNASLVGFTRRLPSCVGRVMEREIEVLETMVRDEMEDGVFVIGGSKIEDAIKVIRRAIEMDNVRRVLLGGLVGNLFLWASGVDLGKPSRKFLDMKGYTGYLDEARELLEEGDDVILVPEDVALNRGGEREEVDVDELPADAPVFDIGTGTIERYRKEVESAGMVVANGPMGVYEEPGFEKGTYEVLNAIADSEAFSVIGGGHIIAAAKACGAYDSIDHVSTGGGAMLRMLAGERLPAIDAILTCPFSGC

SEQ ID NO: 1661 - protein, 180 aa, Methanopyrus kandleri
LDRIRKIMRREAEVIEYACNNLPEEDVKKALDLVVEKIRNDRGIFIVGMGRTGLIGECFAVRLVQMGARCYVVGHSTERAIKPDDLLIALSVSGNTAFVNYAADVAKDEGADVLAVTMNADSKIAEKADVVVVLPEPEEIILRTFSEMLMLSFLDGFTAQLAKELGVDESDMWERHAKIQ

SEQ ID NO: 1662 - protein, 226 aa, Methanopyrus kandleri
MLRVPPVIVNFKAYSEAVGENALRLARVAAEVSEETGVEVGICPPHVDLRDVVREVGDEVTVLAQAVDAAEPGGRTGHVTPEMVVEAGADGTLLNHSERRMLLEDLKDVCRACINEGLLTIVCASDALAARAAGALSPHAVAVEPPELIGTGTPVSKADPEVVERSVEVVKEVSEETAVLCGAGITDGSDVRAAVELGADGVLVASGVVLADDPKEALLDLISGLE

SEQ ID NO: 1663 - protein, 212 aa, Methanopyrus kandleri
LSGKRNAARKAAEEVCRRGYEVIGVGAGTTVEAFLEELVKREADVLVFTTIPGTIDACRRIGLNVTTIPPEELPVAIDGADAVDPDGNLLKGGGACHSLEKAIDYTADEFWVVVDESKLVENLWELPVPVEVLRGCYELTVRTLEEFGEVRPRTCDEKYGPVVSDSGNPIVDLHVDDWDPAELERELNSVPGVVECGVFPGDKVDRIIVGRS

SEQ ID NO: 1664 - protein, 542 aa, Methanopyrus kandleri
MSDKVLVIGAGPNRIGQGIEFDYCTVHAVWAIQEEGYKAIIVNNNPETVSTDYDTSDKLYFEPITLEDVLNIVEKERPIGVLTQFGGQTSVNLTVPLAERGVRVLGTDPDDVDRLEDRDRFSKLLKKLGIPQPESGTANDPEEAVEVAEDIGYPVLVRPSYVIGGRAMEIVYDEEDLRRYIEEAAKVSPEHPILIDRFIEGGIECEIDGARDEAGNVLIPGIMEHIEEAGVHSGDSACVVPPQTLPEHAQETVLEYAEDIAEGANVIGLINIQFVYDPEEDEVYVIEANPRASRTVPFISKAVGIPLAKIGTKAILGREIPEVLDEMGLEPPDGDPGIVAVKEAVFSFEKWPGVDPVLGPEMKATGEVMGIDRTFGAAYWKAQLAAGHELPLEGTAVISVADRDKPDIVPIARKLQRLGFDLLATRGTASHLREHGIECEVVRKVSEGSPNIVDLIREGEIDLIINTPTEGKDARRDGYAIRRAAVKFKVPYITTIAAAKAAVEAIELVKEKGVTVNCLHDIHKGDWTPREVKPEELTRYGG

SEQ ID NO: 1665 - protein, 291 aa, Methanopyrus kandleri
LIVLATSEGVKLGRRLAEELDAELAPVEEDRFPDGEQIVRVPPELDGTVVVVHSMSPPQDENLVKAIITLDAARENGAEEVIAIVPYMAYSRQDRRFEPGEPVSFRAVARAVSANADALITVDLHEPGTLKYFDVPAENVSAAEELGKYLAERFEGEDLVVIGPDEGARELAREVASICGVEYDHLEKKRLSGDEVEIHPKELDVEGRTVVLVDDMIDTGGTMVEAARALRDQGAGTLYAACTHALLTRNAATRLLASGFEDIIATDTVPNPFEKVSVAPPVAEAVENLSG

SEQ ID NO: 1666 - protein, 89 aa, Methanopyrus kandleri
LTELQVGDYARYVRTGTVGKVVDVKEREDGRWIQLDSTGLYYHEDYVEKVEKKESKEKEETDIEEVVERIRELKEAFEHVDERVCEGGG

SEQ ID NO: 1667 - protein, 79 aa, Methanopyrus kandleri
MRVSELLQRHVITNRGHDLGTVMEVELAWKDKCIKALLVQPSKEYAQQVKADVVEVPWSSVLAVGKYVLVDESKIRPRR

SEQ ID NO: 1668 - protein, 207 aa, Methanopyrus kandleri
VMAGGRAKRMGGVEKPAVEVAGKPLLVWVLEALQDCCCVDRITVAVSRDAGVTRSIAERLGAEVVVTPGDGYVHDLRFALESVGTPALTVTADLPCLTPDIVGLVIAAWAAVPEPSLSVWVPRSLIVKAGLSLWRRFESTVGNVRAVVVGLNVVGGLRKTDEFKLLLDEPRLAYNVNTWHDLRKVEGVLRSCPREERAQGLQALKTR

SEQ ID NO: 1669 - protein, 241 aa, Methanopyrus kandleri
VIRVEFLKVFRFLTVLPIGEHPKSPREIGEQAWLGLPAVGLVSGLLAGVVAWAFAGTPVRGCLVVLTLLVLEGAQHFDGLVDVGDALMAGVISEEGATKAMRDPRVGVGGLAIGSMALLLAVASFGWIPFEVLVPIEVFSRFTVLPMAAVGEPAPASYSGRVFTEYVDADQVLLGGILSTVVSLPFSPVATLTCAVCSAVVAWTCLEAARRTIRGVNGDFLGASIWVSRVLSAVCLSSLPW

SEQ ID NO: 1670 - protein, 357 aa, Methanopyrus kandleri
VEFFHVIKDERAVVLEFENPVKYVSSAFYSDGVGEVRWVANIRVEKGWSHDDPWGYVEERLHELGLEPEDTLAFLTAADVEQAAIVQKGDVFAVATAGFGNAYCSKTKEHDLGGPGTVNVIAVVGRPLTTRSLVEALTWAVEAKCHGVLRIVLGNEGPCLGTTTDSVAVLCPQGDELDSFCGPATELGRRLMSAVEEAVVTAGERAGYSPTRSIKTILEEEGIELNDLVEAGRELFVGEWKEEHASRVLEELERGLENPNVALAVFTALLIDRFVRLGTYPEECGELREDPGWVYFDEVLGQFVAMELGGYGALFNFKRYDEEKPGILKEVDERWVMLDDVLAGLVAGAMTAAFRRG

SEQ ID NO: 1671 - protein, 990 aa, Methanopyrus kandleri
VAEAERPAGKEYTTISEVSGPLMVVEGVEGAKYGEVVEVETPTGEVRRGQVLEARRDAAVVQVFEGTSGLDTTSTKVRFTGETLRIPVSTDLLGRILNGRGEPIDGGPEIVPEDELDIHGAPINPAARKYPSDFIQTGISAIDGMNTLVRGQKLPIFSGSGLPHNELAAQIARQATVPGEEEEFAVVFAAMGITHEEAAFFRREFEETGALDRAVLILNLADDPSMERIITPRIALTVAEYLAFENDMHVLVILTDMTNYCFAPGTRVITASGDVVEIDEIVERAAETAVDGGLREGSTEVTVGVTNVRTLAAWDGDLTSNDVVAVEKIEAPSRAVRVRTRSGAELVVSEDHKFLVDTEDGPRMVEASELKSGDELYSVRELRVSEKVPTYLELLLEAEDKFYVHPTEEFEEAVAERYGSLAEACREKELPYRAREAKERRYYELSEFARLATAVIESVDEATEYIDYVTAGGRKRVKFSSPRPGKEVMYVAGLIASDGSVDTERGFVMFSNTERELLSAFEEIVTEEFGVDASKTENQNGVTMLRVNSRVLARVFERLADPKTVLKMPRELVAAYLAGYVDGDGHLKDGKIVITTADRERAGDLQLLLKRLGVPSVLRERDGAYDVVVTGHDAAELAEELPLRHPKKAEAAASMSSGRRSSRFDRVSRRFGRLLREVRRKYGVRASDLGSSSTISQIESGERRATRRLALEIVERLEEVVGDVEEVRELRELAEGNYVLDEVVEVETVEYEHEYLYDVTVVPDHTLVVENGIITSNCEALREISAAREEVPGRRGYPGYMYTDLATIYERAGCIRGRKGSITQMPILTMPHDDITHPIPDLTGYITEGQIVLSRDLHRRGIYPPIDVLPSLSRLMDEGIGKGKTREDHPDLSNQLYAAYAEGRDLRDLVAVVGEEALTERDRKFLKFADEFEQRFVKQGRDENRSIEETLDLGWELLAILPERELKRVSDELIEKYHPKYRQKKEEQEE

SEQ ID NO: 1672 - protein, 232 aa, Methanopyrus kandleri
VTQEILEDVNPTRMELLKLQDRIELAKKGHKLLKEKRDALIMEFFEMVKRASEIREQAVKKLMEAYSKLAAAKVTVGEIGVERASMATGEEIKVDVGSRNVMGVVVPIIERVSEDGGSKVVYGFADTSGALDEAMRAFTEAIDAVLELAEIEETLRLMAEEIERTKRRVNALEHIVIPRLENTEKYIEMKLDEQERENFVRLKRVKDLIERKKLKEELERVVEEGAELPSFE

SEQ ID NO: 1673 - protein, 126 aa, Methanopyrus kandleri
MVFVSVAKRKVTERVRRRREPYDFKTDMFEGRFEPLIAAEDVTVEEGEDVIIKVEPIEIPPHTMVLLSPYARNPYGHVLAVAEEFPKMMELGRKVEQVYFAAVRHGRIRKGDVLGVLILIELKGEE

SEQ ID NO: 1674 - protein, 147 aa, Methanopyrus kandleri
MRDESRLDKYVIKEILRINRHLPRRRKTLEELLREERPHVVNRDGTKHYFDRDELERLADILPRYLHGRLKLPILIELGYSGAAVIRGKAEVRVVCEVLGEEWRFSQDRVELNMLDVRKLRREFPTATQYMFSTEYIMGRPKVERRG

SEQ ID NO: 1675 - protein, 154 aa, Methanopyrus kandleri
MAVELPKAAIERIFRQGIGERRLSQDAKDTIYDFVPTMAEYVANAAKSVLDASGKKTLMEEHLKALADVLMVEGVEDYDGELFGRATVRRILKRAGIERASSDAVDLYNKLICRATEELGEKAAEYADEDGRKTVQGEDVEKAITYSMPKGGEL

SEQ ID NO: 1676 - protein, 741 aa, Methanopyrus kandleri
MPAWRRVNWNFLERREYQVSVAAEILDSMDNTLVVIPTGLGKTAIGVMVLSELVDEGRAVFLAPTVPLVNQHARFIERATRGLDVKALTGRVRPERRKVEWKKSDVIVATPHVIRNDIIEGRIDPDEASVVIFDEAHRAVGGYPYVYVSKEFNCLKVGLTASPGSDVKRIKEVVQNLGIERIIVKTEEDPDVKKYLGRVKVEWVDVELPEWFDNARRELQRAFERRLELLEDMGFLQSSRNVWVGKLLSLREEIREQMAKRRERASWCSRALGVVAEALRIARAREILETQGIEPFLRYVERLTERKRSSGGSSLRRILGDPNFQRAVRECKSASLRDEPDHPKLPEVEELVKDVESALVFTQYVDTAKLIADYLKEIGISVGVLLGKEHMKEHEQLDVIKSIKRGECRVLVSTSVGEEGLDLPTCEEVVLYEPVPSEIRTIQRIGRTARDGAVGNAHVLVARGSFPTLDEIYFHVARRREKKMLEAVMRVQEWLRKRKGKTTATSKNLRKLRSRAKTLDQFVGGGRSKRERDEVRPPSRAPVIVVDSRELNTKVVEHLRRKPVVLERDTLELADYVVGEGVGVERKSESDFARSLLDGRLMDQAREMTREFDRAVIIVEGNPRREIEPEAVDGALATLAVDFGISVLQSAGPEETAELLYRMAKRFEERQRPRPRKRRSTEDLRVEMLSCIPGVGPELARRLLDEFGSIGDVVNASPSELKRVKGIGERKAREIRRFLWS

SEQ ID NO: 1677 - protein, 255 aa, Methanopyrus kandleri
LRLLILTGPPGSGKTCFARELARELRQEGWRVAHVEADALRGFLWDEFDPKLEQVARELFLKSVETCLDAELDLVIADDTNYYSSMRRELALLALERKVPWGIVYLRTGLDTCLRRNRERGEPIPEEVVRRIYDRFEPPEPDRWWERATLVLDDSRVSEEVLEFVESGLRVEKPKKRRRRTDPSSVNEVDVRTRQVMGELMRRLSETGAATQELGRKLSELRREIVSSVEDPEKAVREFRRRAEEVIRECLHGDG

SEQ ID NO: 1678 - protein, 333 aa, Methanopyrus kandleri
MGISEKLGLSKGQRYVFFGGKGGVGKTTCAAATAVWLSEEEGKEVLVVSTDPAHSLSDIFDQNIGSEPTPIEGVEGLKAIEIDPEKAAEEYVEVMKRVYEMSKDKGMEDLFGGEDLLKEQEELLKSSPGIDEAAAFQKFMELMKDDSYDVIVFDTAPTGHTLRFLSVPETLERQVKTMIKVRRTLRQVSKMLKTLIPFADSDEDEEDEILENLEKMKKEIEEIRETLSDASLTAFRLVMTPEEMAIYEARRALRTLNHYEIPVDMVIVNKVMPKRADECEFCRTRRKMEEKRLKLVEKYFGDKEIHQIPMFAEEVRGLGKIRQVAEILYGEPA

SEQ ID NO: 1679 - protein, 227 aa, Methanopyrus kandleri
LVRKPKKFPKRRYELHAHTYLTDGELLPAEFLRRAEELKHEALVFTEHVDPSNLEDAVSRLAEACDALRGYYRTEPVPGAELTHVPPDLIPELAEEARDNGARVVLVHGETPAEPVKPGTNEVAASCDAVDVLAHPGLIDLETARMASENGVALEITTKRGHCLANGWVVRVALETDVELVLNTDAHLPGDLLKPEEAATAAMGAGLPEKMLKWVLEEVPRKILKKR

SEQ ID NO: 1680 - protein, 988 aa, Methanopyrus kandleri
VAPKSMLKHIRNNVVWELPEDYKGCMKVPGRIYATEKLIDGMEKGVFDQVANVACLPGIYGYSIALPDAHYGYGFPIGGVAAFDVEEGVVSPGGVGYDINCLAPGTKILTEHGCWVKVEDLPKMLTDQKLKVYDVDEGREDDSEIKFVMERGIEEDERAVVLVTESGLTIEGSEDHPVLTPEGYVELGEIEEGDLVVVYPFEGVEYEEKEGTILDESDFEDVDPQVLRYLEERDLIPLRWSDPKVGTLARILGFAMGDGHLGEQAGRLTLSFYGDERTLRELKRDLESLGVKANLHVRKRRYEIETASGRYEGEATSVELRVASRSFALLMEKLGMPRGRKVETPYKVPDWIKEAPLWVKRNFLAGLFAADGSVVKFKRYTPLPINLTQAKVEELEENLREFMNDVAKLLREFGIETTLYEVKSKKNVVYKLAIVGEENIKRFLGKVGYEYDPEKKVEGLAAYAYLKLKERVKKDRKEAAETAAEVYEETGSITKAHEAVADVVNRRFVERVVYDGGISSVRVPEDFPTFERFKEERVLAGGFVIEEVVEVKGVEPEYDRFYDIGVCHGAHNFIADGVVVHNCGVRVMKTDLTEDDVRPKLRELLETIFRNVPAGLGSRHRRVRLSTQELRQVMLYGAEWAVEEGFGFDEDLDHIESRGNMTHAYETIGWEEYGPRDDVASKRAIERGRPQLGTLGSGNHFLEVQVVDEIYDKEAAEKMGIREEGQVTIMVHTGSRGFGHQVCSDHLRIMERSMRDVERRFGVRIPDRQLACAAMGTDEAKRYFNAMNAAANYAFANRQMISHWTRESFVEVFGDEYGDADDMGIEVIYDIAHNMAKIEKHPVDGEERWLVVHRKGATRAFSEEALKKHGEPVPFEGLPQPVLIPGDMGTGSYILIGTEKAMEETWGSTCHGAGRTMSRAAAKRKFWGEDVARELERQGILVKAASMPVVAEEAPPAYKDVDEVVRAVAEAGISDPVVRLRPIGVVKG

SEQ ID NO: 1681 - protein, 218 aa, Methanopyrus kandleri
MRVEVDPEVNDRGLRYAYVRVEGVDPGADASELVDRVTARLRERFDLDDLKDDPIVRAYRDYLWSIDVDPTKVRPAGEALLRRALRGNFPRINAVVDSYNLASAEYRVPISCFDADKLTGDLIIRPAESGEVMVDIAGERMELDDRFVVVADEDGPVSVSPYRDARRTAVTDETERVLLLAHGVPGVEVEHLVEALKTAVRYLREGAEAESASRIVTP

SEQ ID NO: 1682 - protein, 207 aa, Methanopyrus kandleri
VEGTRQRVFYGLLSRVYERSPLSLPKHLVKEILRDLKGCCRVLDVGCATGYLTRKLAAVCDRVVGVDINRKMVEASQSRNRLPNVKFVRADAHNLPFPDACFDGIVLSEILQHLDVIRALKEVDRVAARGCRMAVVLPDPTSRAARVATRLIHVFTGNNAWVSPGTVVGIMRDMDWKLVRFQSAGKRVLITMEKRGAGDAGRSGPGG

SEQ ID NO: 1683 - protein, 276 aa, Methanopyrus kandleri
VIKRILPCTVLAMIVCTAVGLQPAHSEKAPVPKPPKLEEKKEEEKKEEKERKESTLKPGKYKVAEADFKNGVVYLKPLYKPKPVIPVKVPPRVIRKLRPGTVVEVHQRGSSTVIRTASGTAEGSTVITRTESSSGTMGHTTSSSEALQTGSTSSSTSTPSHTSVGTSAGAGTYGNTTVNAKEKTVSSEGGKTAGSSKSKESKGKREKKEKNRSSKEKIKVKRPKSSGSSDLELQREASSGSSSGWAPYLVAIALVGAATGGMWLVKQRRSTTWEWE

SEQ ID NO: 1684 - protein, 123 aa, Methanopyrus kandleri
MFEGTGFGWVEYGGERYNHDIYVTTEGKVHRREKGLSRSKFGTSHNLAADELRRLLELCDEEPEVIVVGTGQSGVLSVTEEAREFCEERGIELVEAPTPEAIERYNELKDKGKKVAAVIHTTC

SEQ ID NO: 1685 - protein, 254 aa, Methanopyrus kandleri
MTAFEVRDLRVYYGEEEALKGITLDIPEKKITTIIGPSGCGKSTFLRCLNLMIKEIPYARTEGEVIFDGENVLEYEDEADIIAHRRRVGTVFQHPNPFPWMSIYDNVAYGLRLMGMDEDEIEDRVYEALEKAALLDQVEDRLDDPASALSGGQQQRLCIARALAMRPEVLLMDEPTSDLDPIATRKIEETVMELKGEVTIVFVTHLLPQAYRIGDYTAFFLHGELVEANSTEKLFTDPQDERTKEYIEVEFGPS

SEQ ID NO: 1686 - protein, 594 aa, Methanopyrus kandleri
MREVAAKQAQESENLIKSATAAAAISIAAVIGIYLFLTLNGVKALQYDSVIDILFGTVWRPDSYPPRLGLLPMIISTLYVTLIAVVIAFPISLLCATYLAEFAPRILRRTLRPAIDMLAGIPSVVYGLFGILTLVPFAREYLGAPTGYSVLVAGIIVAIMILPYMTSVMMEAMRAVPREYVEAALGMGATRWQVVRTVLWPAARSGITAGGMLGTLRAMGETVAVALVAGAALMIPTSPLDPCRPLSAHILLQATVLPVGSPGYYALYFGGLVLMLMVTGVIVLAYRYRRRTGRIRVRKRKSHHARLNPVIVSKLMTGLMVLAGVIAAAALVGITGYIFANGVGALSWNILFGPINIGDPVHSSLYPALLGTLALMFYSTVFAALIGIPTALYLAEFAGDTAFTRAVRFAIDTLAGVPSIVYGLFGATLFVVYMKMGYSVLAGALTLAVMNLPVMVRTAEEAFRSVPREYVEAARGMGASWFHVVRDVLLPMAKPGITAGITLSMCRAAEEAAPIILTAVMIGLISTNPFVHVLQPTDALAFRIYLIAKEYLMEPGARATAFAAATVLVAVTLGLNLLAIYMRDKFERKIGRRG

SEQ ID NO: 1687 - protein, 329 aa, Methanopyrus kandleri
VGGEILKKYLIAAVVAIAVIAGGAAYYYSTAGAVKTQLRIGGSTSLMPFMMKVAAYVGEEHRMTWKQIGEQVGVQGLPDEPVQLMVSDGGSSAGIKGLIEGTFDIAMASRPLKPEEAQQLSDPVMCPVVLSAIVPIVNGKTLGQLDDIDPKTLRDIYTGKIKYWDQVKPGLPHKKIVVIGRAKGSGTRSTFDKYLNIQDYTKDAILCGSNSEVLEKVEKTPYAIGYVDYAYVVKAKKGGKVPSAVKPLKVNGVEANEQTIIAKKYPLVRAEYLIIDRSNAPKTAIALIKWIRKPDVNKEFAEKVGYVPVPEDAPLFSKKPYIEIKPLVK

SEQ ID NO: 1688 - protein, 294 aa, Methanopyrus kandleri
LRQCRICGIPETVDGVELDESGVCRACRRQIRHIPSRKELREKVRKALENSEKVLVAVSGGLDSLAALGLALRICDEVVALTVDTGALHPEAWRRIILARRMSGIEWEIIGDQKPFLKLFEERLTRAESPCGPCSRMITRRYERRARELGVDAIVTGHELPHGTSPVVPKDPPVIRAMCGMTENERREIVEEEFGLTVDKISGYTSNCIVLPFALKLFYMKYGYSFEAPRLAAMVRYGYISREDMEQIMTPPTLSDLKELLRECEEWIPESLKQMLQKVINKISNSDLGRENGD

SEQ ID NO: 1689 - protein, 264 aa, Methanopyrus kandleri
LELLRKKVSGKKICVLISGGMDSAVATKILQLSNTDVRGLHITHRWMWFTPEIEIKRISKMLGIKIDVVDITDELRRRLRGAKGKSVCKICKKIMLEIAVSKASVVATGECGMDTIAGAVLDVSRRTGIEPEFVQLPKRYFNGDDRIIVRPLIRIHESDVKRLARLLGVKVRRVGETGDLRRGRREGCPLQHLDPWVDVTDELMDEVWDVNVEALLVARRLGRRVSVKWPSFRIILEGSPEERRHVAECVWYRWVRAGRPRRYR

SEQ ID NO: 1690 - DNA, 1694969 bp, Methanopyrus kandleri
gcgtagcgagcggtgtgacgtccactatcaccccatctacgactttcaacctgaccttttgtccgaccatgtcggaaagacgtgcacgtacactgggatcgactttgagttggagcacttcaccatcgcaccgcacgatggcggtgccgtcttggatccccagaagcacgccctcgatgacggacgtctcgtgcggtatctccggaggtggcggtaccggtgaggcgaccgccgccaggattaggacgggggttaacccgaccggcaaccggaccggcccctcatcgagcggcgccacctctcggctcgtcgtagtatcatcttggtggtgaggccggatacggactcaggtcggagtacttctcgagcccgataagcggaggggggtcgcgacgccaagattactatcgagtgaaagatccgcggatgcttcctcactgcatcgataagcatggacctccaaaatttttccctacccagggagaaccagtcgtcgtggatgatcccgagggtccctaggtcgtgagctgttaactcttctccgagagggagtaactcgcgggctaactcctcaccccgttggtggacccgcttagccactgacgcgggcacgcgggcttcggaccgaatacgtgtccagtgtcttccgaaacagttcacgccgaagcgcagaaaaatctgtttggagtagtggggagccgttttgcgcagttccgcgtacacgtctacgtcggatgtgaacatcgctcaaccctcgggccgaacttcgactgtcgcgggctccccctctttcccgcggatttcgacgctcacggggaggaatttctccaccacccacgcgttcgtcgggaggtgcggatcgacaccggttacaccgaagaccgattcaccgtcggcgatcgctaggaatggcaggatctgatctcccatgtgctcgtcaagggccattccagtgcgaagacgctgcacgagctgctccgcggcctctcgtcccaccacctccgcgggcttgcctttctcacccagcgcatcggcaccgatcctgttcccttgatcgtcttccgcccataagacgataccgctgccgggacctaggtgtggatcgcggcctttagggtacgtctcgatctcgatttcaggtctgatcccgagctccctctcgataatttccgaagctgccttggcctgacgctccgccacgtggggtggtaaccgcacgcagtgggagatccctcgaacgctctccagctcgccgaacttcacggcttccagcggcttcagccgcttcgggggttccatcctggccctgactatccctccaccccgaggataatggccgcgtcgcaggacctcgagctcgtaccggtaaccgaggcggtctaggtagtgtgcgttgacgttgatctcgtagtccacgggcggtgaccacttgacgtccgtcccgcctcgcacttccatctccacgggcccgtcggcggctatcgccgcgagcttgacggcttgaagcagtagggtcacgctacccgcggtaccgatatctacctcgtactcccctcctttcaccttccccggctcgaacacgatctcggtcgaacctatctcgagtccctcgcactccgcatcgcagatctcggccacggccttcactgcgtgtaggtgctggtgtgagaggccgggacgtggcctgttggcccggatgttgtatatccggacgggttcacctgtcagcgctgacatcccgaccgccgttcggagtatctggcctccaccctcaccgtaggaaccgtcgatctctatcaagctcatcaccggcaccggcgatgaggagggtccggatggccgcgctcgtgaggagagaacccggggctgagccggatcttaacgccgtcactcttcctccatcggtttcacttctatttcactggcttccgccttcggcgccctcacgatcaggagaccacgaccgcacttcgcactgacggcgctcgggttgattttctccggtaagtctatcctccgtcggacctcgccggtcacgcgctcccgcgtcttggcctcaccctctcgcatcttcgggatgttagccgtgatctccacgaacctctcacccgctctgacctgaacgtcctccgggcgggcgccgggaacctccgcgacgatgacgaactctcccgaacgttcgaaaacgtccacggcgggcgtgtgtagcgatcttatcattctgataagctggctcgaagccccttccagtagctccgtaatctcctcaggctccatttccttcaagatagaccctactagccgcccgtcctcccggaagagctttatcaactcctccgtggcctcgaggccggccttagcgctcctcatcccgaccttcatcatgtcctcgatcacgcccactgtagtgccccctcgccagatcgttcaggagctcgcggagttctttcagtccggtcctctccgtcgccgagaccttataaacgggttccccttcgagatcgggttcctcccacagatcccgtaggtcggctttcgtcagcaccacgtagaccggtacgtcgaactccttccggacgcggtccagcaactccagctgctcctccactggatatccacaggttccggtgggatctatcaggaagagcacggcgtccgtcacgtgctttagggccgcgatcgcctgtcgctcgaccggattgcgctcttcctccggtcgttccagcaaacccggtgtgtcgagcatttgcacggggtacgggcgctccatgtagcctacttggatgcccttggtagtgaagggatacggggcgatctccggcctcgagcccgtgagcaccgtcataagggtggttttaccgacgttggggaaccccgctaaggtcacggtgaacatctcggtgtcgatcgcgggtaggtctacgagcttcggctgcaccttccggaggaacctgagcgcgtctccaaccttcctgcggatcgtcgaagccagtctcccgaacgcctgacgtctcaactccgcggcggtccgggggtccctcgccctcttgatcttccgagtgtactcctcccggatcaacctggctatcttggcgaccgtatgcacgtcggccagactgcttttcagcctgtcgatgcccgctagcgcgtccgccaactcccggtagaacgggtgaagctcgtcgaggttgggcgtcttcctcacgatctcccagaggcggtcctgcaccaactggcacgccgtgttgacgcgtgctatctcgatggacctggccctgacttcaggcggtgtcctggtaccgtagaacgatttcctggtgccttcagcggctctctccgcccgtcggaaggcgacgtcgatcagctcttccgggtccggtacctcgggcatcttccgaaacgggttcccggacacggtatcgcctcccgtaaacctttttgagtcgacagaggccgtccggcgagaaaacggcgacgggggttccgcgaatggagtatatttacgcggcgttgctgcttcatgccgcaggtcaggagattaacgaggacaacctacggaaggtcctagaggccgcaggtgtggatgtcgacgacgccaggctgaaggcgaccgtggcggccctagaagaagtcgacatcgacgaggctatcgaagaggccgccgtcccagccgccgcaccggcggccgcagcgccagccgaagaggaggaagaggaagaggccgaagcggaagaggaagaagaggaagaggaggaagaagaagcggaagaggaagcggcagcgggcctcggtgcactgttcgggtaaacctcagaagaacgcgtctaacgtcctctgttcacctcctccttccttcttcttttcctctctctcctcttcttcctccgctttttctacggcttcctcgatctccttcgcttcctcttctacctccgattcttcacgttttctctcgagcatggactccatcgcacctttcacccgctctctgcggatcttccgcagcttctcgcgaacgcgcaacgcccgctgatatacccgctgagccacctgtggatcgccgcagaggaacccgatttcccgtttggagagttctagatagccggcgatccctcctaggatttccaaaccgcgatcggtgggattgtccgcgaccttccggaacgcgatctcgagcactgaaatcacgtccatcttggcacggcgtgtggacacatgcatgcgttccgcgatctttttcgctatggaattccggacctcacgctctttgcgggtagtccccagcttccgcaggatcttgggaggttggaaccgaacgaaccccggtggtttacccttccgggccgcggctacacccgacgtcatgaggtcggtggcgtagacgtacttgaacctccagtccccggtctctatcgcacgactcgagaatacgtcggctttggacaggtaatcatacgcgcgggcgatctcctccggatctcggtacgctcgaggtatgttctgagctatccacaggatcacgtcgtccggatcctcgtctaagttccagagcgcgcgtctggcctgtctgggcggtttgttgaagatcctacccagagcctcgaagatggtgatctccttatcacgccacccgagcgcttccacgtcatcggacgttaccctacccgtgggccttgcgagcgcctccagatcgttgatcgcagccctaagatctcccctggcacgcttcgcgatccgacgcagggccacctcctcgtactcgataccctcccgctcgcagatgcgacgtaatgcctcgacgatgtcgttgacgcggagccggcggaactcgatcatccgaacggcgtcacgtagggacttgggtaacacccacgggtcgttggcgacgaggaccatggggttacgggcctgacgtacggcccgcgtgagcgcggtcaccccacctctatcttccctgggatcgatcccgtcgacctcgtccacgaggactagaaccctgtccgagtgaccctccacatgttcgtaatctcccccggcttccctggtcattcggaggagggagcgtgaggtggaggcgccgcccacgatcttctcgatcacgtttcgtgtgcgcttgtccgacgcgttgagttcgatcacgtcccagccgaagtcgtgggctagggcgtacgcggcgctcgtctttccggtcccgggtggtccatgaagtagcacggcccgcggttccggaatactaccgcgcgcccactcgttcgcccatgcggctagctccttcttggcctcgtcctggttcaccagctctttgagcgacctaggtcggtacttctcaacccaagggaccaacggtgctacccgccggagtactcgttaccgagtgcgtgaattcgggctaacagggcctctaactggatccgctcgtccgagccgcggatcaggcggtactcgaagtcaccgacggcgttcacaagctccggaattgcctcctccggtatctcgtccatgtcgaagatttcccggtgtacctgacggacgacgtcctctcccgacattccgtacctggtgaggagctcgtgtagtagttctctggcccgctcgaagtccccgttccaggcgtggtggatcatctcccgcacctcctcggggcgagccgtagccgcgatctggaacaccgtatcctcgtcgatctcccgtccgagcgccgcggcagcttggagtacgttaatggcacgccgcatatcgccctcggagacgtaaacgatcgcgtccagggcgtcctccgttatctcgactccttcactctcagcgatcttccttaaccgctccttgatggcgctctcgggtagcttggtgaacttaaacactacacaccggctctggatggggtcgatgatcgcggaagagtagttcgctgcgagtatgaaccgacacgcgtcggagtacatctccataattctacggagggcctgttgcgagtccctggtcaggttatccgcctcatcgaggaagattatcttgaaccgggcccctcccatcggccgggtcctggcgaagttcttcaccttggtccgaattacgtcgatacccctctcatcggagttgtgcagcaggaccggaacctcacccgcgaagaacatctcgttgccgggtacgctcacgtcgtagacgtagccgtcgtagtccatgacgtccagatcctcgaccttaacggcgtgcacgtccgatcgtacgagcgtcctgagcatccggtacgctctcctagcgtccccacggagatttttcgcatcgaccgaggagaggacctttcggacggcctctttcgatacccgaccgtcgaacacccacgactcgagatcgtccacgaggtcagattcgagcctttcgacgagtttcagaaccggatcggccggtaacaagtcgcccgtacgggtctcccaaaccagctcaacaccgtcgtccgtcacacggctctcgacacccgagatccgggccagccacgccagatccaccgatacgtcctccgaggcctcgatcacgccgtcatcggctaactcacgtaggagctcgacccgaacctccacgggcagctcgtaggtggtgtccgagacccgagatccggatccgaccgacgtgaccaccgtgccgccatcggtgggttgttcgtcgagttccgcgacgaagctgagtagaaacgagccttcctctatctcggatgccttcaccgcccggaggccgccctcgtccagtaccatcaccgcgtggttacccgtgagctcgatcgttccgtcctcgaggtggacgcgcaggatcttacgggcacggtgtctgatgagcttggaaacgcgggcccaagtcaccctgaagttcctatcgaccgtcaaaacctccaaatcgctcacgtccacgtactcgccgccacgatccccgaagtaccagctgtcgaggtcctcgaaggtcacccggaggacttcgccgcccctccgcacgaggatcggagtgtccgcggacacggaagcgttcagctcgaggaagttgtctctccagtgctcaccgaacagttcccgcgctaagcacagagccgccgtcgttttgccggttccaggtggacccgcgaagagcaggttgggcatgtcgccgcggttcacgtaggccttcagacgctcgaccacgtgctcctggtcgacgatgtcgtccagacgcttaggccggtacttttccacccacggtatctcgagaacgcgtagctcgtgctcggccatctcgacgtccccgggggatcacatcgcccgtgataaaaaccgattcggtcggaggagatcagccggtcaggtacttcatgactggcagctccctccgcatgcgttccatgtactcgacactgtccgaaacgtcggtgaaaacctcctcaacacgctccacgtgcttcttctccacgacctcggacccttccttctccgccacgattcgagcgggctccaagagtcgcgtcgcgtaccgtatggacttctcctcgccgagatccgtcaggtactcatgagcttcgtccgtcagctggatatcttggactcgggccctgattccaatgatctcgtggatttcgtgacgctcgaagggcctggttctcgcgatcagcatgcggtccagcagatcgcccggaatcccgtgaggggcctcctcatccgtcccgcgtaccttcgccatggccctgttagtagccatcacgaggatcggggcgatctcctcctccagcgacctgttcaagaacgcgaacgcctctatgtccagcatgtgcgcttcgtctatgaacagtactcccgggactaaactggcctcaccttcgtcgaccatcttctggacccgctcgtccaccttctgacggatctcgtcggtaatctcctcctcacggaagcccaggagtcgaccggcccgcacgttggccatgtcgaggtcgtgcagggttaccacgcgcttgatctccttcttcttctgcaccggaccttccgggagctctaccgcgtggactcctaggagctcttcctcttcctcctcgagcgcgtccttcgcccgtccgagcttcgtcacgtgaccgctttctacgtcgatctggatgacatcaccctcacggacaccggcctgcaccagctggatcgctatctcctccggtaccttgaaccttcggtggtcatcctgagtcttgagctcgatgatggccccgctgggcacctccatgtacggggagagcgggtgcttagcacgctcgatctcgaggctttcgaccttcccctcgatcacctcccgcgtctccgtgaactcgacaccaatagcccgccgtatcgcctgctgtaagaactccgtcttgctgaggttcgtgccgtagatctcggaaccggagatggatacgaacggaacgtcttcaccgagttctctggctataccgtacgcgatcgccgtcttacccgtgccgggcggaccgacgagaaggagaccgtgacccgcacgccgaccctgcttgaccatctcgacgactattccggcggcttcacgagcctcctcctgtcccaccaaaccgtctccgacgggcttcgccttgaggttctcatcgaggccgagaccggtgatgtgcgagtgcgctcccggtgatgtttcctccgtggaaacttcgccgatctccttgatctccaccaactttcggcacccccgccgatcaacatgcacttatatttattatttttgggtagctattgaagttcgtaatcgtcattcgaatggtttcaagcaacatttatccacgggatctcatggggacacccgaggggatagacgtgattacagtggtaatctccgaggctccatacggtcaagaacgtgcatacactgcgctgagattcgctctcactgcccttgtcgagggggaagaagtcaagatattcctaatcgaagacggggtgttcttagggaagaaaggccaaaatcctgacgaggttcccaactacttggagctcctggaacagtgcatcgagcagggcgctgaagtgaaggcctgcggaccctgctccaaagcccgcgggctgagcgaggaagacttcatcgagggcgtcgagctggccaccatgcacgacttggtgaattgggtgaaggagtccgataacgtcatcttcttctgacgggaccacctttcggacgtcaacggtatgcgaaaaagggatatcagcccctcggaccggtacgggcagggatccccgtgttacggtggtcgtcggccctcactctcctcgtcctcgcgacgccggcctccgcgacggtgtacgtggcaacgtggacggggcccggtctggacaccgacccgaacccggagacgaattgctggacgacgagcgtctgggacgttaagtggtggaactcccacctcgacgaggtgccggtcaaggagcaaatcgaactcatacccgtcaaggacatctcgaggtggcgtcggatactgtacaccggtgtcgacccggtgacgggccatagaatcgacgtggtctacgttccgggagggtggaggcccgaggagcactggggcagtgattgggacgatctcctcaggtgggcccagttgcatctcgggatcgggtacgtgggaatctgcgccggtgcgacgacgttcatcagggcgttcccgtgcgtatggagcgtcgatggactgaaagggcacgcgctccccgaggtgttgctgctacctcaccctgcgaacccgctggtgcaggagggcgaaagtagagtcatcaggatgtactacgccaacggtcccggcatggagtggaagcgaggctggtacacgataaagtactacatcgacaagaagctgcacaagattaaggcgtactgtgacgttcagggcgtaatgaagtacctggaacacgtgaaaggatgggcctacgtggccggtcggtggatcgtagacggcgtcgagaaaggccggttcgttgtgatgagcgtgcaccccgagataatgggccggaaggacaaggaccccgacatggtacagacgttcatctacgctattctctgggcggcgaagcgactaccttcgggatggaagatacacttgactctggacaagacactggtaggtgtaggcgaagccgtcaaggtcgtcctaaggctggtgaactccgtaggagctccgatagcggacttctccccgatctgggtaaaggtggtcggaccagaaggcgaggaagaacacgtacttaagaccaacgaggagggcaaggcgacactgacggtcgtacccgaatcggaggggctgtatcgcatcgaggcttcagccgtggacgttcaagccacgggatccttctcggtgggcataccaccggtgcctttcccggtggtcacgggagttttgatcgcagcgatattaggaatcgtcgtcaccccgagacgggttcgacagagctctcaaggctagctcggtcagctcatccgcaacgcgttctagcaccatcggtgggatagggtccggatcccggatgtaccgcccggtcgtaaccaacacgtgatcggatggtgccccgtactccctgagctccctcgccacgggcccttcggcctcctcgagctgtacgactcgcacctcctcactgccgtatccgaacacccctccggtgctcacggtaactgctccgaaccgccgtgcttctcgagccagggcggcggtaaccggggtcgtacgacctccagcgatagtaatcacgactacgtccggttcccacgtgtcgactagttcggaggcgttttcttcagtcacgaactcgggctccgcatggacctccctgaggggatgaacacgccccagtcgcgcggcgaactccgccttgttctccccaattctagctccatgtcttaggtgtatgatatcatccggctcgaccctctggccgtcgacgcatacgatcctcttgggacctcctcgatgagtttcgagcaatctcaagaatacgcggaaaccgagcctgcctatgccgcacaaaagaacggtgccgcggggacgcttgcggagctcgagctcctcgatgagttcgtccggttccacgcgtctgatcccccataataatcgttttggtatgcaatcgagacgtcttagtaataagatcgtgagggaaccgacggatgggggagacaccgatgaccgtagctaaagcgatcttcatcaagtgcgggaacttaggcacctccatgatgatggacatgttgttagacgagcgcgccgaccgcgaggacgtggagttccgggtggtcggcacgtccgtcaagatggatccggagtgcgtggaagcggccgtcgagatggcgctcgacatagccgaggacttcgagccggacttcatagtgtacggaggtccgaaccctgccgctccgggcccctccaaggccagggaaatgctggcggactccgagtaccccgctgtcatcatcggcgacgctccgggccttaaggtgaaggacgagatggaagagcaaggactcgggtacatcctcgttaagcccgacgcgatgctcggagctaggcgggagtttctagatcccgtcgaaatggcgatttataacgccgatctgatgaaggtactcgcggcgaccggcgtgttcagagtagtccaggaggcgttcgacgagctgatcgagaaggccaaggaggacgaaatctccgagaacgatttgcccaagttggttatcgataggaacaccctgctggaacgcgaggagttcgagaacccgtacgccatggtcaaggccatggcggccctggagatcgccgagaacgtcgccgacgtctccgtcgaaggatgcttcgtagagcaggataaggagcgctacgtaccgatcgtggcgtccgctcatgagatgatgaggaaggcggcggagctcgccgatgaggcgcgcgaactcgagaagtcgaacgatgccgtcctccggacaccgcacgcgcctgacgggaaggtcctgagcaagcgaaagttcatggaagatcccgagtaacttcttccacccactcttcctccaacagctcgtccagctcgcaccggaagtacgcccggaacatcaccagggagcgttttattccttgcagttgtcgtttcctaattctctcatccggtttcagcaaattagcgtgcacgtccgtcctgcccaggagcgtgatctcgccgtcgtcgaggcagatcgcacccctgccgatacccgccgtggtgccgatcccgacgtccgctccggtacgctcacggacggccctggccatcatgaccgctaccttccggtcggtctcctcccggtaagctttggcacccgacttcgacacctcatcgggttccggcgggtctatgcccagaagggatctcagtccggacacagtcgggatgaaacacgccgccaccacggagacctttccttcgagctccgtgcccagtatctcggatcctaactcgcctgtatacccgctcgcggaagcatgaatctcacgaccgacgaaaccgtgggtgaaacactccgcggttgcgaccctgagcacccaaggtccccctcatgacgtgtatttaaccgttatcccgttggagcagtcggtgcgctaattaatctcaccacccggagggatgacgcattggtaaagataccctaacacggggtgcccacgcatggtcgagatcaacaaagtcgcgattttaggcgccggatgttggagaacccacgccgcgacgggcatcacgacgttcaagcgtgcgtgtgaggtggccgatgagaccggcatcaaagaggccgctctcacgcactccagcgtgacgtacgccgtcgagctgaagcacctggcgggcgtcgacgaggtcgtcctctccgaccccgtgttcgatgccgatggcttcacggtcgtggacatcgaagaggactgcgacgtggatctggacgagttcatcaaggcgcacctcgagggtaaccccgaggacgtgatgccgaagctacgggactacgtgaacgacatcgccgatgacgtcccgaagccgcccaagggagccatccacttcctgagccccgaggagatggaggacaagctcgacatcgtcgtgaccacagacgacgcggaggccgtcgaggacgcggacatgatcatctcctggttgccgaaaggcggagttcagcctgatattttcaagaagatcatcgacgacatcccggaaggctgcatcgtagccaacacctgtacgatcccgacgcgacagttcaaggagatgttcgaagacatgggccgcgatgatctgcaggtaacctcctaccacccggcgaccgtgccggagcacaagggtcaggtgttcgtggcagaaggttacgcggacgaggaagttgtcgaggccgtctacgagctgggtgagaaggcccgcggactggcgttcaaggtcccgggctacctgctgggcccggtgtgcgacatggccagcgccgtcacggcgatcgtgtacgccggcctgctgacgttccgagatgcgtgtaccgacatcctaggagctcccgtggacttcacccagaacatggccgtagaagcactgcagatgatggcgaagttcatggaggaagagggtctagacaagctagaggaggccctggacccggcggcgctcacgaacacggccgactcgatgaacttcggcccgctggcggacacggagatcctgccgaaggccctagaggtcctggagaagtactcgaagaaggcggagtaagcccctttactttcccccacagtctctttccaggggagctcgttgaaggaaccggaaccgggaataaccgatctcacggagaccgtccggtcacgtccgttctgggacgtcgtcaaggagatcgggttagctaaagccgaggaaatcgctgaagttgttccggaaggttcccggatcctcgtgttgggagcatatctgacaggaatcttcgtggcggagctcctctcggaggagcacgaaatcaccgtcctagatcccgaacccgcgcttcggaagatcctacccccgggtgtgaggttcagggccagtcgagtacctcctcccggccgctacgatgtcgtgatagacctaacgggattaggcggaacgaacccccgggtgctacgtaggctgaatcccgaggtactcgtggtagaaaatcccgccgggaacatgaacgaccctcgaatcgaggagtacaacgacaccgaagagcgtctggaggccggggaagaatcctacgagctccggctgttcgacgccccgttcgaggccaagacttccggcacgttcacgctctccgtgaggaccgtacgtgaggctgcgaacaggctggagcgccattacggtgtcctttacgccgtcccgggtgttgttaacctcgaacgatggaccttcagactgaggagacccgaagagggggtcgagcgagctcgggagaaaccggcggtgacggtatcgcagctcaccggttcctcggacccggacgaggtcatcggggaagtccttgatgagatcctcttcgaaatccgtgagcgttgaaggcgttctggaagttctcgagggactggcaccgttcgatctagccgtcgagggagacgaggtgggtctcgtcgcgggggatccctccgactctgtagaccgtgtagtggtatgcttagacctcacacctcagctcgtccgtcggctgtcccccgaaacactcgtgatatcccatcatcccgtccccggacctctgctcgaacgcgtacgatcccccgtgatcgtgttccattcgaactgggacgcagctcgagccgcggaggccctagccgagtggttagggctcgaagatgtccgtaagccggatccgctagccgccgaaggcaggttcgacggcacgctcgaggatctgttgtcgagagtggaggacgctctcaaccctccggaaatacgagtagtcgccactaaaaaccgcatacatcgcgtgatcgtggtctccgggttcggactatccacggaccgtttcgttcgtctcgcggcgaaggagggcgctgacgcggtcgtttccggtgatctaacccaccgaacggccgtcgtcgcccgtgtgctcggtgtgacctgtgtggacgccactcatgcacgtaccgagctgcccgggttgaaggagctcgcagaggaactctcgaaacgcttgcgggtgcgggtagagctgaggtcgcccgagcatccggtgggggatcattatcgtgcgtttcaaagacgcgctgcgcgaagtcaggacggatcgtaagttggccgataccgaggccatcgttcgcttactctccgccaaatcggttagggtacacgacctgttccgagccgccctgagcgagaaactccaccatcgcggagagctggtgaagctcacgtcaacgatacacgtaaccaacgagtgccgcatccggccgagatgtgcgtactgcggcttcgccgcgggcgcgtccccggagggttacttcgagggattcacacggagctacgaggagatcgcagaggccgcgaaagccatcgaggaatcgggaatcccacgcgtcagctgctcgggagcttatcgcggagacgggggtaagctggccgtgaccgccgctagggcggtgaaggagaacaccgacctggagctcctcatcaacttcggccacgacctgtccgaagagaccatagcggagctcgcgaggctagacgtggaaaccatttgctgtaatttggaaaccactaatagggagctgttcgaaaggttgaaacccggagacagcttcgaggagcgcgtccgtgtgtgcgagaccgtatgtcgatacggcattgacctgtcaagcggcctcctagtgggaatcggtgaggactacagggaccgagccgagcatctgaagttcctcgcgaggttcgaaaccctcgcggaaatacccattatggggttcaacccgtatcccggtacactgatggaacacgtgccccgttgtccgctgttggagcaggcgaaggtcatggccgtagccagactgatgtaccccgacttaatgatcaccgcccccacaccgaccgtgggaccggaggaagtcgaggtggcactgatggcgggtgccgacaacctggcgaccgtgataccggacaaccatccgcacgaggttaagggtgtcggaaacccgcggaccggcaacctggatagggtcgtggagctcatcgaggggttcgggctcaagcccgagctcaggggtgaccgagcttgctcgacctcctgcacgaagcttgtgaatcgctcgacgcagcgctcgagctgaagcggctggcttacgaggggaagctaagcgtcgatgaggtggttacggacctgggagaactcacggatcgggaactcgaagccctaggtgacaatctgcgcacgtttccgatgggctgcgatctgatcgagctggccgtaggtccctgtgcctccgattactccccggatgtcctccttgcgaacgccatcctggcggaccggatgggattaccgctccacgtgtgcgcgtacgcggtggcggacgtcgccgagaactacgggatgaggcctatcgagttgttccgtcgccttgtgaggaacgttcgcgtgccggtggacgtggatcatataggagctcacggcccgatgcggtttccgcgagatataaccgcgtgtgagggaacttgctacctggaagggccgccgttcaaagagtgccctcgaggtaggatacatcggcggttgatcgacaaggagaggcagcagggagaggatctggaggaatgggcggaactggcggcctcgatctgtgtgaacgtcacgggagaagggggacaggacgcggaagcccacgccgctccactcgatgagatgaagcgcgtcgccgaaacggctcgacactcgggtgcgggcgtcggagccatcctgcacgtcgcggacggcgaggacgagttcgccgacggcctcaaagcggccgtcgaggaggtgaaagcggactacctagcggtcgaaggaggtccgttcaaccgagccgaagatcgactctcggccttccgacgggccgtagtagcgtgcagggtattcgcgcccggaaaggtcgtcctgaccaacggggcttacgaggacgaactcgtcgtgggactgagagcaggcttgaacggcgccctctcagggttccccaaaaatcaccacggatacatggtcgggtacgagcccggaaccgcgcgacgcggtaagttcggactcccaaaggttctcgcgatcatgcggaagacgttgggctcacggtacgggaacaccaaggtgccggccggctgggaggaactcgaagggatcacgcgggccgctctcttcctgggatccaacttactgtacccgcgagacgtggccggcatcccgataggtgacgtccactgggtagccgccctccggtccaacgccgcccgcgagttgtccgatgaggtcaggtccgtcgaggaggtcgcatcggaagttgacgccgataccgtcgccctgttgggtgggaggttcccggcctggggtctcgccttgaccctcgacgagctgggcgtgtccgaagtgctgataagcgatccggacgcgtgggtcgagagggccaccgtacggttgctggacgaggagctcgacgccacggtacacgcaatggctggggacgatcgcaaggccgtgaaggaagcagacgcggccttcgtgacggccgtcatgccggggatagccgagcgcctagccgagaggaccggggcgatgaccgtgtgctgaaggagacgctgctcaaggcctggtgggagtcctgggaaggcacccgccggggtgacgaggagcgggaggtcgaagggctccgcgagtacttgacctcggcggaccggctcgcggtggtaacgggtaacgaggacaagctccgggcggtcaacaaagtcctccgcaggttcgggttgccggaagccgagatgatcagagtaccgacggagatggcggacgcgacgccgtgtcccgccatcttcaaggcgatcatgggagttcaagtgtcggacgccgacgtagtgatcgctagagggaggttaggggttccgggatccggagccatgaccgtgttcatggacgcgcgatgtaggttgctgacggcggccctttctccacctcacgtccttcacgagatgtcggtgaaagaggctatggagcgcgaagcggaggaagccctgcggcgtctgggtatgagggagaccacgtcccgttaactcgcagtaatacccgaagctcggtcggaaataaaaaacgctcttcttcatttcccgaaccaccaatcctccggggacgggcagtgttctccgttccctcccccggagaccctgccctcaccgaccgacttctacggtcgctcccgactgaccggatcgaaacagtctacttcggcctcccgatcgccgggacaggacgcgccacacccgtgcaggtcgacacggacacggcgaccgagctcgcagaggtttgtcactcgtattcggtggaaccggaagccgtcatcaacccactttgcacggcggatgtagtctgctctcgcaacgccttcgcagagttcgagcggacactcgacgatctcgacgacgccgggatcgaacgtctagtactctccgatccgttgatgatccacgccgcggtggagcgtggcttccgcgtctcagtctcttgtgtagtggaggtgaacacacccgagcgcgcccggtacttcgatgaaataggagtggaggagatcaccttggacacgaacgtgaaccgacgcctcgacaccatcgaagcgatagcgtccgaggtctccgcacgcctccggatcatcgttaacgaagggtgcttacccgactgcccgtaccgggcctcacatttctgtctgttctcccacgccacccggcccggcgaagaagtggcggaagatccctacttcgtacgttgcatctccgagcgcgtgaacaacccgacgctgataatcaagtcaccatttgtgcgacctgaagacctgagcgtctacatggatctcggtgtaagggcgttcaaaatcgcgggacgtgcgaactcgatcacgtggatacgtcgggccgtacgggcttacctgcggggccgatacgacggcaatctcctcgacatactcgactgtccgaccgtcctccggcacctgtatcacgtggataaccgggagctggatgggttcctaaagcgggtaggtcggtgtgatcgtcggtgttcgaagtgcggattctgtgccgagcttgctgagcgggccgtagagccgttgggcggtctagaagatgccgaagttgaaccagcgaggactggtcgagttacggcgtgagttggagcggcggctcgtagaactgctgggcaaaccggtacacgtgatgcagctgacgatcttcgcgctaccgtgcggatgtgtaggtgcttctctggaggtgcgcaacatcgtccgggaagacgctgaggtcttcagggaccacctccgagacctcctacgagagatggtgaaatggacgctggggaaggaacccgacctgtactacgcacggctgactccgtccggttacgatgtagtcagtctaacgggccgcgtagcttgcgacgaatgcgagaagaacttcaagggagcggccgacgtgctcccgctctgacacgacgccctggaagcgttatcggggtaacagcggcgggtgtgcccggtccaaaggacggggcggtcaccgtccggtcggacgaccatctccgccccgccggctgcctgtaccgggcgggttccacccgcccatcgtcgtccggcgggtcgccggacctcgagcgtcccgagttcacttaagtgctttcgggaagaactcgcggcgagcctcccgcagggtgatgcctttgacgcgcgcgtacgctttcctcaatgtctcagcccttatctccatgtgtccttcctcttcggatatgcgtacggcttcgcgtacgacatcctctaatatgtccgggtaatcgtcttccaatctcttgagataccggagtgccaacgggcggaccttaaagtcgtcaggaatgaggtccagagccctcaacctcatacctcggcgccctccaaagcttgggagcaggggcacgatcgtttcggtggaatgtactcgatgcaacgctcaattagttccaccgccttcggtctgagctcctcgaccagctcgaacacctcatcgatcgtgcggcggcgatcgtcgatgccagcggcatagttggtgcacaagcacacggaggcgtagcagatctcgagctccctggcgagcacgacctccgggaatcctgtcattccaacgatatcaccgccgagcttccggaaggcacggatctcggccggcgtctcgaacctgggtccttcggtggccacgtatacagcgccttctttgaccgtgtaccctaggtcgtccgcggccttcagtagcgcttcacgtagctccggacaatagggttcggtgacatcgacgtgaacgaccttctcgtcgtagaacgtcgtcggcctgcgcttagtgaagtcgaggaaatccaccggaaggacgatgtctccaggctcgtattcgtcggagttgatcacgccgacggagttcgtcgccaatatccgtttcacgccgagctcccgcatcgcccacacgatggctcgatagttgatacggtgtgggggcagatcgtggcccttaccgtgccggtttatgaagtacactcgatgatctccgacccgggtgatgtccacgcgtacagtgccgtagggtgtgaacaccgtccgcctgcgttcgggcagaccgggttggaaacccgtgccgcctatcactcctacctcggtcatggatcctcacgctccagcagcggatctatcgccgctttgagaatggagaacgtctcgtcttcggaccatcgggaggtgtcgaggacgagatcgtacaaggagaggtccgtcggatcgacgccgtagatctccttataccgcttcaactcgcttttttcccgttcctgaatgcgtcggcgagcctcttccacgtcgatcccttcgcgcttcgctacccgctcggcgcgcacttctaacggagctttgagccatatcttgagggtggccaggtcgggacctttcacatggtccagttcgccggccgcaacgaaggccgctaggcgtccctcgagtattacgtcaccctcttccgcggcttcccgctgcctccgatcgatttcaaggtcgatgtccgggttgtcctccgcgactttggagaactcctcgaggtccatgcctcgctcctcggccatctctcggaatatcttacctgcgtacacgtgcttaaggccgtagtgctcggcgagccgccgggccatggtggtggtgccggatcccgggaggccgccgatggtgatgactacgctgattgaaaacacccctcattcctcgggctccggcggttcctcgtccggtagtactggcagccacggctgctctcgcttgcgctcccagaacttgtacctcaccttatccttgatgagcttcctagcgcactccgggcacaggacgccaccgtagggacggtttggtcgcttctgcgtcttcggtgcgttcttgagctcgacgttacgaccgcgcatcacgccgttcagccggcgaccacaggctccgcacttgggccagttcgggatcttcttctcgaagtgaatgacggtcctacctccaggggtgcgcttgtacacccgtcgacaggacctggaccggtacctcggggctggcatcgtcgtctcacccacctccgaagcgttttaccgccgtttccgccaagggcttgagcacgaacgacaccgtgacggcgcagaggatgtaccagcccacggggcccaaggtatcccccacacccggcacgtagaagggtaacttcaccgtccagtgggccagccggtactcgagggtgtatataataatgattataggcgggaacgtgatgatcatggccttgatctgcttactcatcagctgggactgaacctttaggaactctcgggagtggtctcgcatcttctcctctatctccttcatcctcttgacatcacctaacaccttagccctctggagctcttcttggtacttcttggtctcgtcagccattttccggactcgctccagctcttccctcccgatcacgagttcgtaaacgatgtcgatgaagagcgtcacaagagccgcagccaccagcatcccaagggcgggaccgaagtagtggataaacgggtcgacgagtgggtaaaagtgccgcgcaaggccttcagtgagtccgtgcacgtctccctccccgtcagagggatcggaccgtctcgacgaactcacgtacggcctcttcgaggcggtcgtcgtggttctcgatgattttcacggtagccccggtcagcgcggcgtaagccatcgctgccattcggttcatcttctgatgctcctctatctcgtgggcccggtcgtagtcacgctgacgctcctctgagtctttcaccctccgcatcatgatctcatcggggtcggcttcgataagaacgatgacgtcgggctgcagctcctcgaggacccagatcggaagacccggcaggtaaccggccggtgttttgatggtacagtgcgtgtcgactatgatcccctccttctcctcggccatcttggcgatcctacgtgcggcgaggcgctggatttcgcgctgcttttcggcggggagcttcctgatctcgtcgcgatgctcgactaggccttcttccttggcgatctcgagcatgacatcgccgtagttaacgtgctcgtaaccctcgagctcctttacggcctcggtggtaacggtcgtggctccgactccgggtactcccgtcgctacgatcacataacccatccaaatccacccctctacgctacctcaaggtcttttcgaggaatttccgcacgacggggtgtgcctccatgaggcgctcttgcttgatctcttcgtacatgttgtagaggattgatactgtcaggagtacgcctgtacctccacccagcgcgcccatcaagtcggcacccgcggcgaggaatcctacgaaggctccacccatcacggtcacggggtagatgtacttctggagccgcttctccaacaccctgatatctcgacggaagcccgggatgtgcaggccagcgcggtgcaggtgtctggcgatctcacgtggtcccataccggtcaactcgacccacaggaccgcgaagaacacggacgctatcaccatggccatcatgtagcccagcgcttgcaaggggtctgatagcgtcttcacgatactgttagggggcgataggtagtacacgagtccggatatcggttgaccgcgcggatcgagcttccccagtatcggtacacccatccgttggaaagccagcgcccacagtcgaacgttcatgaacagcgccgaggccaggatcacggggatgttggacgtgtagagtagacggactgggaagcggcctcgagcaccccgaattccggcgaacgcgatcgggatctcgaccctcataccctcaacgtaaagcactatgaggaacgtgatgatggccccgatgactggggcgagtagcgtccaatccggcgtcccttgcatcgccgagtacaggaacgcccagacggcacccgcggggcgcccgggctgctgcgggctcgggagcgggttgaacgctccgatgataatctgtgacgaaaccccagcgacgatgaatagtccgacaccagatcctataccccacttgctgacgacctcgtccaagaagatgaccaaaatgccaccgagcgccaactgtaagatgagcaggatttcgagcaagatactcggctcggccggcggcgcggcaccgctgaacaccatcatcacaccttcgaagaagcacaggacgatcgcgagcagcttttggagaccttggaagagtcttcgatcctcaggattcgtcagatccaacttgattaggtcgcctccgacgaggagctgcaagaggatcgaagcggtaacgataggaccgatacccagggtgaggatcgaaccgaagtttccggccaggacggcacgcaaattcgcgaagtagtccacagcctgcggtgagagaccatagagcggaatttcacacagtatgaagtaaaggatgagcggtattcctgtgtacttgaacagcttctcgttgaaaggtacgtgcctgtccggaaccttaacctcagggagcctctccaggatcggccttaacctctccagccagtcatccgccaacgtcgtctcctcccagaagcgtttggtggcgactgggacgccgagccttgaaaaaaccggcgggcactatgcttcccgggcttccccacctgcttcctctagcttctcgacggccctttcggtgaactcgggagcgacgaccactagcggcctcttgacgtgaccgcctcctagcaccttgtcgaaggggccgccgtagggtttcagtcgctcgtcggtaacgtcgatgacgatcttatcgccgtccttctccgcgatcccatcctccaagagcttgtccgccagggcgtccaattcgccaacgttgatggtgttgggctcccgaaccaccttgggtggacggttgaacccccgcttaccgaagtgatccggcatgtacttgatgacgtggaaccacttgtgtttgtgcgatccggccataccgcgcccgccgcggttaccggcaccacgccggttcttgtgactgcctccaccgtgggtccgcgatccacggtacttcttcggggacttcttcttccgccgcacgaccacgtggattgcccccttcagatcatccgctccaggaggtcgttgatggccttcccgcggtagccgagcgcgccaccgagcgtgtacggcttcttaatgcctcccctttcgtaccctccgcggggcgggtgcaggcggaagaacggcttcagcttcgggatgtcatcgagttccgcctcgaactcgcagtatgcccgtgcgaactcctctacactgtcgtactcggtgtgttcggacacgtactcgtcggttaccggacgaccgccttctagctctccccgcttcttcagtaaggccgccacggtgtccggttccacctcgccccatgtcacgtaatccttgatcttctgcagcatacccaggtaactcgggcgatcgtcgatcagcacgcaccagttgcgccgcagcagcttcagcatccgcatggtatcctcgatatcccgacgtacgccgacgggaccgcgcacccggacgaccgcgagccgggtagtggctcgctcgtactcccgagcctccgggctgaccttgaccccgatatcctccttcgcgcggcgggccgccgcctcgctcgccgtctcgtgtttcagctcgatcttgccggtagccgccatcttttacgccccctcggcgctgccgctcacgattccgagccgctcggcctcttcctcgcgcatcctcacgtagatcaggttccgcagcgcatcgaacgtcgccttggcgaagttgatcgtggtcctggtctcacccttgcccttgccgcccgtggtcttcgtccagacgtcctcgatgccggccatctccaggaccttctgcgcggtttcgcccgcgacgagcccagtaccccttggagccggcttgagcgtgatgcggacgctgccgcacttgccggtgatctcgaaggggatggaatgcggtcgaccgcagccgcactcccagctaccgcagccgcgacggaccttaatgatgtttagcttagcccggtcgatcgcggcacggatcgcgggacctacctctcgagctttaccctgcccgacacctacgaatccgtccttgtttcctactaccaccgtgaccctgaacctcactcgacggccggacttgtgcatcttctggaccatgttgacgtcgagtacttcctcctccagatcgggcagcagccagtccacgatctccggctctaggatcttccaaccctgagcgaacacctcgtcgatagtcttgatctcgccctccttgaccatgcgacctagtttggtcttgggttcccactcctccagatgtggtggaacggacatgctcgcatcgcccccgtcacgcgccgccgaactcctcctcgattttggactttacttcctcgaagtgttccgggagttcttccggtttcagaccacgttcgaggtacttggagaacctgcgctcgtactcctccgggtcctcttccttgatctgtcgggccaggttggcgatgtgctcaccacggatcctgtcctccggtgggagcacctcctccccgtgcggtatgtccatgccggcgtcgagggctcccttcagcatggcgaacactcgggagccccgcacgggtcggtggagtcctatgtcgatcaccgctcgctcgatgccccgttcaagcgctcggagaccgcacaggtaacccgtcagataggccgccggtgtgtttccgcagtgtcccttccagccgaacttgttgcgcagctcgatggagtgggccgatgccagtgtgacgtcaccatgtggggcgaagtcgacgatctgggcgatgttgtggttgagcgttttcctggccactaggcgcggagcgtcggccttgattaactcacgtcgcttgtagtagttggtcttaccctcgcgacgccttctgaacggaacccgatacctgggacccgtggccaacgcaatcaccccttacttcttccacaggtcgttctcctcgatgtacgccaacaggtgcgaggtgtcgcggaagtatcctcccttcgccatcatgtacagcttccgatacgtgctgcggtcgatcttgccggagtctcggagctcccgcagcttgcgcctgatcggccttattcgctggatccacgcgcgcttcttcggcatccgtgcacccttcgctcccttccgacgacccggaccacgctggcgccccttcttccgctgttcgtgccgcttccgggctctcacccgggactgtcccttgatcggcttcttccggatagccccctccttgatgagccgacggatatcctcccgggtctgggctcgggcgacttcttccagcctctccggatctatccatatcctatgaacaccgcacttgagtatctcggccgccatccgacgctggggccgtaggttcatggtccttctcaccctcctacttcgggcctggaccctccctcaacgccgccgtcggttcgagtcctaattagaatattccccggagggcaccagcgggcggaatatcctgctgcggagctcttcggcctcctcctcgtccaactcccgcacctcgagcttgtcgtcctcctcgggaacgatggccgagtgaccgtaaggatcctttagcacgatcgtgatctcgtcctctcctgaaaccgccgcgtccatcctgcgtaggatttcctccgcccgcttcttggactcctctttatccgcccacttggcggctgtttccacgcgttctcggatcctcctcagcaatccctcgatgttggacacgaaaccctgagcagcgggacctggcttgacctcgatcccgagctcgggtatttcaacgaaacccgaaggtgagcgaaccactcgaacgcgaagatcctcgggtgagttaacccggtaccggtactccgcaggttcccgatcctccaaacacataacatcggagtgccgatacccgcacgccttacagtggatgaactgctcgaggactcgcccgaagtgtggtatctcatccactcttccgtgtaccatcagtgccttttctccacacactggacactccaagtcggataactccattttatacttcatttcatgggtttcgcggttatcctcccctatcttctttcccaacctcgcacacgtcccccggccgtagctcttctaccttaaatccctcctctcgaagcttctcgatggcacgatgcagtgactcctcgtccggagcagagattttatgataatgcacgttattcgacgcagagtagagatgtttgaagtactgccgcgattcctcgttgttcaaaatttcttcccattcgtccacggggtcccttcggaaggatactttgatcacatcgcgcttacctgggatgggaaaaccaatgtctattaacctacaattgttctcccgtataatttcggcctcacggacggaatcttccagactatggacggatttgatcactacactgacgcttcggactacggacagcacctcgctgaccgtgcggtcgatatcatcgttcttgatagtgggtataccgtgctcgtccgccgcttcgaggaggaagtcatggataattcggatctggcggaagtactcgagatgtcgacctccacgacccttctccatagcacgcttcacgaaccgctcacggtgctcctcttcgtccgcgtagagtatgaccatgtggacgtcggcatactggtagtcttccgggcgcacgaggcccggtacgaggtggacgccttctatcaccaagtcactagcgtcctcgacagccctcttgatcaccatgtcgatggcgggcttcaccattgaggcgtgctccacgaaacctgcgatgactcggtctcggaacctcttgggaaccatgtggtcgggaattctgagcgcgcgataggcgttgtaggaggacatgtggagcacaggagcgtactttttgtcgatcgctccccggagaacctctcgaaggtgatcagtctcgatgaggtgtgtaatattgagtctcctcgcgacctcacgagcgatcgtggacgtcccaacgcccgaagcgccaccgatcagcacgatcgtggatctagccatttatcagccccgcctctcgatgtcaacactatcggaagtgaccagcagcacggtgtctttaataaccccgacgaatccaccaaggctcaccgcggtgcgtttgagttcttggataatatcctcatgaccatcgcgatcgaggaggggtttgacatccagtatcagcacgttcccttggtaaagctcattcatcaactcctccaaatccgacggctcctgaacccgagatactattatcgtaactttggggtgctgagttctctcttcctcttcctcctccaggaagtcctcaagcatggggcctttcgagttctccccctcgccaaagatctttttcaagaaccctaacatcgtgccccgccccgaccggccccctcgatagtgcggagcacgtcccgtgccagcttctcggattcctcgacggggttcctcactggaacttgctctcccgtagcccgccatatcttagcacggagtctacgagcgtacgtctcgaagggttcctccaagtttctcgggttcacgcacaccgccgcgaggtccgcgtcggggactataacccggagggcattgacttcggccaaaaccccacgagggtaccggaacgggtggttcggacggtgacataccaccaccgcatccggagcacacccgagtaatatccctaagtagaggggccgtggatgcgggttacgacgctcggtgagtgaagactgtccctctacaatgatcacgtcggcgtctttctcctcagcgacgtagtcgacggcgtgggctactgcggaggctacgtccatgacggagagagaacccgcccggaaccccacgtccgcttcgagcgctgcgaactctcccgtggccaccgtcgcgggggtatagcctgacgcctcgagtccttccgctaacttgagggtcgtagtacgtttaccacactcttgagaggtcccacccacgaacacgcgcggtatttccgtctcaggcctgtccttcttgggtaccacctcagtgcagcgttctggggcgtccccggctacctcacgaacgacgtccagcctggggctcagttcgaggatcttgacgcctttcgactcggccagcttcactagcgcaggatagtcttcgagcggaagtgacctgaaggacgtaactacattgaggccgcggcggatggattccacggccagctccagggctctgtgttccgcacccttcggaagcataatcgccacggaggacgccccttcgacggcctcatcgaagtcgttcgtaactttcactccggcgatctccattcccaccttactcgggtcgtcgtccataatcccaacgacttcgaccgtgggaagtgtcgcgaacttttccccgccgcccccggcacctaccacggcgaacgggttgagctcggcaagctcatcgatcgaacgtagcaccgtcaactgtagccgccccccggcttcaccgcgatccgcgccggccagtgctgatagtattaccggtaccccggagcggcccgtagcgttcgtcgcttctcacgaacccgacgctcgatctccctgagcagcctcccgataccctcgccggtaagggcggacacggggatgggtctgtgaccagtacgctccctgatgcgttctaaccgttcctcaagttccccgcggtcgagaagatcgatcttgttcgcgacgagcagcgtctcgaggtcggcggcgtacttgatcacgtggagtgcacggagcgtttcgggacctacatgccgcgtgacgtcgaccacgaacagcgccagatcgtatctgccgagcttctcggcgacgtcctcggcacggacacctcgtttacttcgcttaccccgctcgtcggcgagtccgacggtatcgaacacgtacagggggaactcgcgggacgtccaacggtaaccggagaccgtcttcgtggtaccggggacttcggagacctcagtgacctcgcgacccatcagcgcgttgaccagagtggacttgccggcgttttcaggccccaacacggcgatacgaaaggcccgcgagtccaactccggaacctctttcacggaggtctctttcatcccctcaccccccgcacaacccgggctaaacctgccaagaaccccaggatcactcccaaaaccgggagcaacaccttgagcggtctatgttgcacgtattgggataagatccagcctgcaaccaccccaaacaccacggagctcgaaagctccacagcagcgatatactccctccgcaaggggcccacccggggatagtgatttggacgtggaggcggtttaccgattgaagcgcatactcaggacggggtggttagtccggggtatccccagaagctccgtggaaagcgtcgcggaacactctttcggtgcggcgatgttggcctgggagatctgccatcgactggccgagcgagggatcgacgtcgacccttacaagactgtcgttatggcgctgatccacgatctcccggaagccctcaccttggacctagatgtcgaggcatcgcgggtgttcggtgatgccaagcgcgaagcggaggaaaaagccgccgaatgcgtgttcgatgaggaactactcgatctttggagggagttcgagcgacgtgaatccccggaggcgaaggctgccaagctcgcggacactctcgacatggccctgcaggccttggagtactctcaagtcgggttcgaagcgtatcgggagttcttagactcagcggagcgcgaggccagggagctaggccgggagtacctactagttttcaaagagatattacgcgagcgggggtgggatagtaatgaaggtggtggaaaaggatctggataaaggatacatagaagtacttcctgaaacgttggacgatctgtggcacttataccatgttgtcaggaagggcgatctagtattcgcactggaaagacgacgggttaaagatgagagggctgaaactattaggagagataaaggagaacgcaaaccggtttacctaggagtccgagtagaagatgtagagtttgacaaatacgcgaacagattgcgaatcaaaggtgtaatagagcacggtcccgagtctggatcgcaccataccgttaatgttacgactgggaaacgaataaagattgtaaaggacgaatgggaacgaaaagacctagagcgcatcgaagaagctgagatgtcgcgaccacccgtgatgctcgtggccgtggacacaggtgaggggaccatcggaatagtccgagactacgggttagacgtcgtggctcgggttcggcataacgtaccggggaagcgtggcggcgaccggagggcggagatgcggaagttcttccatcgactcgccgacgagatcgagcgcatcgccgaggaggaaggagtggaacacatcgtcgtgggcggcccggggttcgtgaagtcggatttcgcagagttcttacgggaggagcgggatatcccagcccacgtggaggatactggttcggcgggcgaggccgggctcatcgagatgatccgacgcggagcggtagagagggccgtcgaagagtctagggtcgcggaggaagtaaagcatctcgaggaagtgttcaagaggatcggtaagggtgatgataaggtagcgtacggcgtccgagagtgtctcaaagccgcggagttcggagctatcgacgtactgctggtggcggacgagaagttccgggaagcgatggtggaaggtgaagaggacgtcctgaacgccgtcaagtacgcggagcgtacaggggccgaggtgctcatcgtaagcacggaacacgagtggggcgagaggctacgggaattggggggaatcgccgcactgcttcggttctctatccccacggggtagcacggtaatcgtgcaccggcgagagcacacgtcccccgtgtcatggagtatctcgacgtcgtgaccggccagccggcacagttcatctatgaggttgaccaccggacatgcgggatacctccttatggagtcctggatgatccgcttcgtcctatccgacagggactcgtactttttgagcatcgaaaagggcgagatcgggcaccctcttaccgttacaacgattttgtcactctcgacctcgattttcgccgcttcgcccaacatccgatcacaaacgtccttcactatgacgtcgacagagactcgttcgaatccggcgtagtccggcatcaactcgtattcgagatatgactcggcagcccgtcggtacagggtcttccggaacgctgtagctcgctctccgaacatctcggcgggcaccacgatgatcgcgaagttgaagtgtcggagcagtgagcgcgggtccttcaatcctccacctcccgcacctcgccacgctccttcacgaagactttctccgggtccacccgaatcccctcatcggtgatctcgaacgggtgacgccgcatgctgtgtgcagttcccctcatcttccacactatcaacgacctccagagtcttccttctacttcgtcgagatcgagccggataataccatccacggcgtgctccacacccggacctccgaagccacgttcgtgggcggcgatctggttaaccaggatgctggtacaccctagccccgcgagcatccgtttgagcctgaacatgatccgacgcgccacactgggcttatcgatgtataacggggtcacggagtctatagccaccctcttggcctcgacgtcgttgacggcttgcctgatcactccgatcagctcactggcatccgtcggatccttcacgacgtacttctcgtactcgctcgccctgcctatgccgcccgtgaacgcgtccacgacggctaggaggccctcctcctcgtactcccggaagttccagccgaacccttccacgttcttcctaacctgaactgggtgctcctcgagcgtcacgaagacaccgggctcaccttcttccagccctgcccagatgaactgctgtgagaatatcgtcttacccgttcccggacctccggtcagtagtacggcgttacgctccgggatccccccgttgaggacttcgtccatccccggaatacccgttgagactctctccacggccatgggaccgtcccccgtcgaactcccctaaggtcaattcgattataattcattgcgatcgggggttgtcctttgggaggactctgcccgagatgcaggggccgcggatggtgtgggcgcgaccgctgccccttcttggacgcactgaacgaggtccgagccaggctctcgagtcggaacgtcgatggttacaccgtgacggcccacgtctcgtggcgtgggtacccgcgggttatcgccgcgccgggagtcggagaacaccgcacgccggatgaagggggcgtcctggccgacctcccgtacgaagaggccctgaagactagagcactcaccttccgcagataccgtgggaagcgtgatgtccggaacccgccggacctgtcggaccccgagatcgagtcgtcgatttccgtgagacccgtggagagtacgttgcaggtccgacggaggcttagcggcgcgtccagaaccaccccattcatcgggcccttggtcgagggagagctcgaactcgacgggacaccgaaggtccctcgcgacttggaacgttatcacgaggacgacgtcaaagctgaggaggccgtcgtcggcctctaccgacgcggctacgacgagtcgtacatcgcgcgggcgttgtcgttaggattgttgggcagggaccgccggatggtgccgacccgatggagcgtcgcggcggtggattcgatggtctccgaacacctggcacgggaggtcagagacttaccggtgtcttcggagtaccgcgttttatcgggtgaagtgttcggtaacgagatgtgggtgattttacgcccagaaccgttgtcgtacgagctcgtcgaagcttacgagccaggtgcgccgtggtccgatcgcacacggatcgctgtacttagggactcggaagtgaaggattgcaaggagccccgcgaaaccggaggtgcgtacttcgcggcccgattagcggccctagagtggtgttccgagctgggtaaacagcacggaatcaccgtgatcaggatcgttcggaaggagtactcggcaccgttgggtgcgtgggtgatcagggaagccgtacgacgcgccgaagaggtgttttcaacggacgatccgcgcgaggtgtgggagttcctgcgagagaagttggacgatccagtgggtgaagccgctctgaaggtgatcaaacgtggccgccagagaactctcgacacgtttttatgagtaagtaggagccgagcaatagggaggaaggcgatgctactgttgaaggaccacgcggaagtactgcttacggtcgaggaactcggtaccagggaggaggccagggagatcgccgaggaggccgaggcggtcacggaaatcatcccccagcggttgctagagctcgagcttcaaggtctgatgaagcgagtcggaccgaacgaatgggagctaaccgacgccggaaagaccgctgcgaaggcggtagctgaggccgtcgatattctggagcagccaccccaagaatgggcgcatgaccgatgggtcggctcggacacggtgttggcgctgaaacacgcggccctgtctttcgtgccggagcgttgggaggaactactgagcgagcgtggtctgtcggaggatggcgaactgacaaaagccggcgagctggtgttggaggcgtacttcaaggcgactccgaaactgtacgtcactcaggatgtagccggacggatagccaggttaccaccaggacccggaacgctgaaaaccttcatcagatatcgggaaactatagacattccagataacatcttccacgcgctcgaggcgatgcggctgctggtgatctccccacccgcggacggtggccgcacgtacactctaacggcgctcggccgtgaggtcaagtacgcgatcgaaaaggcgattcccgccatgcacctggtgttgtcccctgggatcatggaggacgtaaaggccgtgagtgagggagaagaacccgaggacatggagcgcctcgagcggctcggatacgcgtggaagggatcgttaacgagggccggtgagcacgtcctccgagcctacgagatggtgggagaagatttcccgggtgtgccacctatcagcatacgtccaagcgagctgaggcttctggagatcatcgaccacctgtaccgcccagacgagaaccctaacgtggctcctaccctgaagagaatcaagagggtgctagtagaggagtacggggaggctgatcccgaccccaccacggacctcaaggagttggaggcgcacggattcgtggagaaaaccgtctgcgactacgggaaggaaaagggcaagccgatatgggtactcaccgaggaaggagaacggttacttcacggcctgggcgcgccggtgcgagcggaaggtgtcaaagccgtcaccgtgtcgatgggtttcgagtcgccttctcctgagtggctggaggaggcccaccgggccggtctggtatcgcaagccgctatcaccacgaaggggctgatggccgccaagatagcgcgtcgtgtggagagagccccattcttaaccggagacgaggccaagctgatctaccgcatgcccaacgggtcgatcgacagagggaaactgatcgaggacgtttgtgaccggtacgggctcgaagagcaccaggtcctggagtcactgtcgaaattggagtctcgaggtatagtcgaagagttgctcacgggaggggtaatactaacgcgagccggccaacacctcaagacggcgatacaccgtggtcagacgatggaaatcttgaagctccgacacccaattacaccggtcgcgactcgtctcctcaaggcagtatacgacctgaagagggaaggtgttagcgcgaagaagctctccaagttcccgaagaccctactgaagagagccgacgtcacgctggaccaagctaagaaagccgtagggttgttgcgacggaccaagatgatgagtggatggaagatcacggaggccggggaggaattactcagggcgttcgaagtgcttcaggaagccccggaggtgcgacagcatccggaggaagccgcttaatccccctccccaaatccccaaacccatccagtgggaaaacgttacggttcttgtaacgatttgaggcttggtgcggccgccgggatttgaacccgggccacgggctcggaaggcccgcgtcctaccagactagactgcggccgctccaccgtcgtgggcggtcggattccaactataaaaatatttcggacatattcggtgggccgccgtgcgtgcgacagccgagggagtttcccttcatagctgaggcattcgctcggcgctaccgcctccgataccggcggggcgacggtcgcgccactcccggacaccgcatagacgtatgttatagagcccgtaacaatttcgacctggggaaagaaagcccctatcggcgtcggacggccaccagcgcgatcccgagcaagcacaccgcggccaccggtacctgaacgaacttcttgagcgcactttccgccgtggctgccgcctgctgcgcctcggggctgctgaggacatcctgcaggaccgtcacggcttcaccgatcaagttctcgaggttgtcaacactgaactccgccttcaggtccgtcagaccctgctgctcgttcacttctaggaacgcacggagcgcgtacccggtctcttcgtcgacctccttctcttcctccccttccttctcctcctcactgacctcgagtttctggagctcttccggctcggctcccgtcaccgacgccttcacgaagtacttgaacacgagcgcctgcaggtaccccacgggagtcttcttcttaccgtgggggtgaccgtactcgtgcgtagccagtactcgcgccaggccttctaggagctcccggttgagtttcacctggaacttcccgacctcaatcgtcagttcttctggagcgaccatcttgagcgacagacctaccggcagcggcttggtctccagcgatagggccaggagagcccctttggccagatgagctggcttccactgcctgaacttcacggccggcggaagcttacctgacatcgcgttggggtccaccactacagcatcatccgtctctcccgtcaccgccggagttagatccacaatcaacgcggcgtgattcccgtcggctacgaacaccccgtagtacgccttacctagcggtagttgagcgccggccggtgcttccacggagatcacgtactctttcggtatctgcttggcctggttcgcggagagctggaatgtccacgggtgcgtcagcactccgtatagcggtgcttcttcagccgcggcgccacccaccgccgcaaggaccaacgctagaagtgctagggctcgcatgttacattcccccgcacttatagtagactgaaatcgaataattaaccttttcgttcgcctctgtggactgagctggtgtcagtatcggccttagttcttccttaattttgcgatgaaaaatccctgacatcggtcggtatgagggtagaaccgtcgggttcccggaactaatcccctcctaccgaattgaaggttcaccttctcaatagtcacatcgtaccgtcttgcgactcttcggatcacgttttcattttcgttaatagtcaaagtacatgttgaatacaccacaatacctccaggtcgaacggtctttatcgctgcttccaacaattctgattggagtttagcgtaacgtcgcacacgtttcttcgtgacgttccacctggtttccggtcgcttctggacggaacccataccggaacatggaggatcgacaatggctcggtcggcctcttcatccagctcctccggtatctctcgagcgtccgcacatcggagttcgacgacaccatcgggaacacgctgccacgccaacttctcccgcatagcgtccaatcgccagtcggatttgtcgaccgcaaggatctctccttcgccctccatcaaacagagggcatggagcgtctttccgccgggagccgcgcagaggtcgactacgaactccccgggttgtggatcgagtacgtgggcgactgccgcggaggccttatcttgagtgaacaccagaccctccttccacgcctcagttctgactataggtatctcctcctcgactacacgtagcaggtccggtatgtgctcatccggctccgtcagcacaccctcctccgccaggcgctcgcggacttcgtctacgtccgcccgcagtgtgttcacgcggacgtactttaccgcgggtttgttgcacgctcggaggaagtcttctatctcgtcctcgggcagcacgcggcggacgtaatcgacgaagtcgggtgggaagtagtgccgcaggcaaaggtcatcgtaaccgcgtcgcttcagccggtctacgtcgtacttctcgaggtcgaaacatacggcgtgcacgaagtcggccactctatcgctgactagctccttagctacccgcgtcgcagcgtcggttaccaacgccggactagttccctcgaacagcatctcgtcagctgcggttaccagaactcccttcagctccggaccaagatcttcgaaagatcccgattgaatgacgtcatcgaggatctcctcgcagagtcccaaccgcttgccgagttccataagtcgacggtgaatggccctagcccgatggctgggaatggagaacggattgtcgagagcccggtagaacgactccttcagggagaccccggaccggtagtgctcagcgagtatcctggctagcatagatactatctcactgaccttcacacgacctcccttcggtcggccagtcgcgttcgtaaagaaataggtttaggagagacgagacgtcacgagctcataggcgctaggctggcgatctagggtgcgactccggcactgtcgccccttctacgatctattttttccgtgcatgcgtgcgggctacggcctgcacaccggttccgatgtaggtcgaacctcgaaaggagttctcggtgggaatcccagcatgggcccgtcgtttctcagaaccccgcgacgtccggattggggaaatcattatatcccgtcaactggacgtaaagccgggcggcggtgggtgggctggcggctcccccgccccgaggaaggacccgccggagcaaggcaatgaaggcgggtccgtcggggtacggccgtggggccgctaaggggaggaagctccgcccccgggcccgggcccgccgccccgagagggggccggccgagaggccggggaccggccacagaaacgacacgtccgtcggcggatggcgatgacgcggctgaggcccgccgtgggcgggccgagaagggccccggcgacggggcccgagctaacccgcagaggacgccggcgggatcggtgaaacgggccgcccggcggggggcgaggccgaatgagcccgatgatacgagggtgatgcccccgatgagttcccgggccggagggggatggtaggccgctgaggtgaatgccgccgtctaaggctacagaaggcgggctatagcccacccaccgccgcccgcccgtaatcgtcacgggtgtcgtaacaaataacgcaaggggtgggacgcgctcacgtggataccccggatctctcggcgcccgtagcccccttaaccagtggcacgagttcttcggcgctaagacccaccttgtacagttcaccctgcctcgactcgcgccgggccagctccttacggacgtcggagatcacccgcattcggtacaggtcccactcgggctcgatcctctcctcgtccggtgccctgtccttagagagcctctgaatgaggacggtcggcgccatacgttccagggcatcggccaggagcctgatgtactcgcggtagctcagcggcttgtagcggcgatcgtagtacatacgttccagatcggtacgctctagcacgaccagcggatacagcttcacggcctccactccgagcaccgagaggaccctgacggtctcaagcatctcgtctcgggtctcaccgggaagcccgaagatgatgtggttaactattcggatcccgcgttccttggcccgggtgatggcgtcgatcacctcggcaagtccgtgaccgcgccgcgtgcggcgcaaggtgcgatggtggtaagactgaacccctatctcgagccagacgtcgtaaccttctttgacgtagccctcgaggatgtccaggacctcgtccggtaagcagtccggtcgtgttcctatggatagaccgacgacgtcttccatctccagggcacggttgtacagttcctccaggacgtcgggaggcgcgtaggtgttcgtggccgggtagaagtacacgaggaacttctcggcaccgtacctctcgcggaacacttccatctgcttacgagcctgctcctcgagcttcttacgcgggtccacgttgggagtgatgatcgtcctgcccatcttcgggcagaataggcacccttcccgggatatcctgccgtccttgttcgggcacacgaagccggcgtccacggccgccttcataaccttgcaacctttctcgcgacggtaatacgcgccgaaggccgcgaacttctctccgtcctcgtacagctcccggactatccgttcgtcgacgtacctgggtaaggcaccatcggtcgccggttcgacctcccgttggagcgtctcgaggtcccggagatcggatttaatagcccccacccccgtgttgaggtcgagttaacggatacaaaaaccgctcgggagtggcggtacatgccaccgaaatggtacaggcacgtgatgagagtgctctccgaatcgcacgtggtgttggaggttcgagacgtgcgatatccggaggagacacggtgggaaaagctccccagactggaggacgtgttcgacttcacccgggtggtcgtgctcaacaaggccgacctggtcccccgggccgagaccgagcgtgtgaaggaggaagtggagctcgaggaggacgtacctgcggtgtacgtaagcgcacgcgagcgcatgggtttccggcacctccgtaggaccatctacgaggtagcgccggaagacgtcgagaccgtgagagtgggtgtagtagggtttcagaacgtcggtaagtccacgataattaacgcattgacccggaggagtgccgcagaaacctctcgacgtgcgggatacacccgcggaaagcagtgggtacgcggtggtaggaaactgttggtcatcgactcgccgggtgtgatcccgaccgacgaggctgcggccgaggccgtggcgctggatccagacgtcctggaggatcccgtagagccggcgttaggcgtgatcgagcgcgtcgtccgcgagtatccaggggcactgtccgacaaattcggtatcgatgaatcgatggatccggagaggatcctccgggatatctcagaacgcttgggtaaagacctcagaacgaccgcgaaactactcctccgggagtgggtggacggcagcctggtggagatttatcggaccacgcgggccgacctagctgagacttcggagctagaggtaggtggcaccgcccagcgcttagtggaggagactctccgtgagatcgaggaagtggtacccgaaggtatcccccctagcgccgcgacggtccgggggattctaacgaggctggcccacggagagaacgtggacggcgtgggattcggcaccataaggctgggtgaatacggtgtgggagtgtccgtcggcgaccggtactacgatcgaatggttaggagactgcgtcgtgaactggggggcgaagtgatctctgaggagcggttcagagtgggcgccaacgggcggaaggcggtggcactggtgaccaagggtcggtagcgcgggccggtttcctcaccttctgccctgatcggaccccatggccctccccatcccctcgaatcagcgcggggagttctccgcatctccggccgtactcggagcctgaaaccgtcatcatcccaacccgtggacggttaggtccgtaaaaaagcatcgtggagggactgcacgttgatagctctagtgaagtccgtcgaggagtacaggcggcttctgggagaagtcgtcgaggagggtgatgtggtggtagagctgggatgccaccggggcgccgccactcggattatactcaccggctccccccgacgtgtcgtcgccgtggactacggtaaggacgccgaggaggccatgcgagagttggaacgtagtcatcccgagctcacgttcgtcaaaggggacgccagggaatacgacaccctcaaacgtgtcctcgaagaactaggcggacctgaatgtgacgtgctggccgtggacctcggcggtggtatgttcccggacaccgcgttcaaggtgtactacgtgtggtcggtgacactgcgaccacgggatgcggtggtacgaaacgctggtctctgcgagtttctgaagctggccgagctccgggaagaggtgcacctcgacgacgagaaccggggttatctcggagagttgagccctcccgggatcccaggtaggatccgagagcggttcgaagagttcaagttgtggaggggatgaggagcctctcaattgtaggtcgtatggagatactacgtcctccgtatggccacataccgcttgatcggacaccgtgccatgtcgtcacacgccaagcaatccctcgggtggttcctgcagcccgttaccctcgcgtaaccacccatcagggccgcgcccttgcgaccgtcgtagtgtttcaggagcttgtcggcgcactctccgacctcgggcggcacgctcccgtttatacccggcatgcccgaccacgtcgcgtgcaacccgcattccctggctatctcgacggctctctccatcaagcgtttcggggctccggggtgccgttccaggacgaagttaggcctgaacgccaggaagcacaccggaacggactcgtcgaggtccgccaggaactcgcacatcgccctaatctcctccgtatcgtgggccttcggaattagaaggatccgaacttcccaaattttatccagatacttggggattaagaactccaggttccgcaagacaggctcgacgcgggctcccgtgatggcccggtgaaggggatcggagtacgctttgaagtcgaaggtgatcgagtccgccaacttaacgatacgacgcatgctcttgcgcgtcgcgaacccgttcgtgtcgaagttgaccttccataggtccgtcgtgtcccggtaatgctcgacgacctgctctatataaggcaggtgtatggtgggctcgccgcccgagaagaatatcctgtccgccccgatcatgcgaccctgattcgtttcgatcatgttcacagcctcgacggcgagctctttgggatcctgatagcccagggcccgtccctcggggttgtcgggataatgagctatatcccagttctgacagttgaggcaccgataattgcatccggccatgaacaccgtatagctggccggtggcgccgggtgaagttgcttagcggcgatgacaggttcggtgacgcgacagacgccgcgttccccctcgagcctgtcgacaccacattcccaggcgcagagcttacagttgcgtaggtccttcacgcgaccaccccacacccgaaccaacacctttctacaccctccggggatgacgaggcgaccgaacaccgataagtgaggaactcaggcggcgctgacccttgcactgggagggtgaaaaaagacggaggcttaaggagctggaacgcgccatagagcggggagaggtggacgaagccgccattccggtcctagagaccctcaactcgttcgaagagtactgtacgaccagcagctgctccggccgggtggtcgtactccatgagccagaggtaggtgacaagatagggtccgagttcgtggccaagtggcacgagccaccggagccggaggaagttcgtgaagccgtgctgaaagcccctgaggaaggcataacgtgggtgaaagcccagccacccctgttccacgtgatgtgtagggacttggaggcggccgttcggctgaggaatatcgcctcagaagccgggttcaaggcgtcgtccatacgttcggtcaaaagttcaaaggtgatcgtagagatcctcggcggtgagcggatggacgttccggccaaagtcaacgggaaactgacactgcgcgagaaggcgtgggatagcgtcgtcgccctttgcaacgacatcctacggagcgggcacgagcggctcagtcggctggtggaagcgctgaaggggttgagcaggtgatggtgctgaaacgtgccgcggacatggttccgaaaggattccgggatttagtcgagcccatcctggacgactgtgctgacttggaggagctagcggatcgcgtcgtcgaaaccgaaatggagccagatgaagtacgccgcagagacgttgggaacaccgattctaacgagccggtggcgattttcggatcctcgtgcgtcctgtgcggaggtgactgctcgtccgtccggctcacctccaggataggtatttgcgagcggtgtcttccggtcgatacggagacgctacgcgaagtactgaaggaagccagaaaacgtcacgggtacgtaggagaggctttactgatgttcatcctggtagaacgctactcaccggatcgggtggaggaattcttccgtcggtacgtctggccggaactgttcaccgagatcgtcgacagggtcttcgaccgggctaccgggttccgactatattcggcacaacgtgtatggacgcggagactggttaaaggttgcagtttctcgatactggccccgaccggtaccggcaagacctcttggggctcgttagtagcggcggtgttcggacatgccggacgcagggtgtactacctagtcccaaccacaactctggtccggcaggtcgaaaataggatcaagggattcgcgcgcgacgccgaactggacgtcgatgtagtcgcgtatcacgcggctatgcccacccaagctaaacgagaggctttagaacgtatctcttccggagatttcgacgttctgatcactacggcgcagttcttggttcaccgtgtggaggacctcgagaagctgaacttcgatctgatcttagtggacgacgtggacgcgatcatccggggtaccggacgcaacgtcgaccgcgtgctccgcgtcgccggactcgagcaggaggagatcgatagcgcgtacaggttggctaccctccgacggcgctactactcactccgagattggcttcggtcgttggaagaccgcggagacaagcgcgcggagcgtgtccgggaggaactccgagaggtcgagcgcgagatcgaggagctcgaggaactgttgaagcgggttaaaaaagagcgcgatctcgcacggatcgtgttcatgagcgcgacgggagccgcggccccctccagacgtctcgccgtggtccgagagctcttcgatttcgaggtcggagcgggcggggagggtctccgtaacattcaggacatcgcggtgatctccgagccgtccccggaagccgtggaacggatcgtccggaaagccggcgtgaagggaggtctgatcttcgtcccacagcggttaccgggagagaagaaagccagagagatcgtggaggagctcgcggagcacctgcggtcttcagggatcgaggctcgagcgattcatgccggaacgcccgccgaggagcgggaggaggccatcgacggcttctccgaaggggacgtagacgttctggtggccgtagccagcccttacggcgtgatagttcgaggtctcgacttaccacaagccgccaggtacgcggtcttctacggggtcccccgacagcggataaggctgactccgcgcgaggaagacctcaaggacccgacatacgtagcctcggccctgtccaacctggccagactgctggacgatcgcagagcgaggagtcgcttggagggtgtagcgggtcgactgtggaggatcatcagacgcgggacctggatcagggagcggctggaagaggccgtggaaccgctctccttgaatacgctgatgaaactcgcgaagcgagacccggaagatatcgccgagcaactcgacgtcgacaggtggctggcacggcacgttcaaacgttagccgaaggtgtgcgagagctgactcggttgttgggcgaccctgaccgggtgaaggccctggccgaagaagctacgacggtcgctgtgtacgaagaaggcgaggaagcctacttggaggttcccgacctccggacgtacatacaagccagcggtagagttagccgtctcttcgccggtggagtgaccttcgggttgtccttcgtcctatgtcccgaggacgaacgcgagcttcggacactgaacggtctgatccgacgcatgtcctacacctacggttcggagttcgaatggaggtcctacccgaagtctttggacatgaaggagatcggtctagagctcaaggaaatttcggacgaggaactcgaggaactcgtgaggaaggtggacgaagaccgggaacgagtccggaaggtactcgcaggcgagctgaaaccggaggaaaccggtcgactcgcccgttcagccttgatgatcgtggaatctccaaacaaggcccgcatgatcgcctcgctgttctcccagcgcccgtcacgccgcagactgaacggaggggtggcgtacgaagctgcagcggacggtcttcatctcaccgtcgtcgccacacagggtcacgtcgccgacttggtcgaagagcccggagtccacggtgtgctccggatcgacgaacgctgggtgccgatgtacgacgtcctgggcaggtgtagcgagtgtggtgagcaggtggtcggttccgaagagtgtccgaactgcggcggtgaagtagagctcaagaccccgcttctagagtcgatccgggaactagcctcggaggcggacgtgatactcatcggaacggacccggacaccgagggagagaagatcggatgggacgtcttcaactacctgggctggaccacggcccaggtgtaccgaactgagttccacgaggtcactagacgcggcatctccgaggcactgaaggaagagagctggaagaacgtcgatgcaggccgtgtgtcggctcagattctccggcgagtggccgacagatggatcgggttctcactatctcaggacttgtgggacgtgttcaagcacctcgagataaagctaggagagctcccatcgggctccaggatcgaggtgaggctggacatcccgagcggggtagaagtagtagatttccggcgcacgttcgacgaggattcctcggtcaggtccaggtcggtgagactgcgccgagaaggcgacgagtacgtggtgcgtactcgcatcagtcgtggcggcgacgtgacgtataccgcgacgcttctggatccgaacaggaagctcggagacaggaacggagtgcgaccggagcttgtgcgtgtacgcgcgtccgtcaacggtgagccggtcgatccgaacgtcaagctggagccgatgacgtggctgagcgctggtcgagttcaaaccccagtgctcggatggatcatagatagagcccgagaataccgtgagaccgagttctacgcgtgtcgcgcggaggttccggcggacgacgtgaccatccgtgcattgatcgaggaactgaaggtaccgcgagctctgacggagaagttggacgaagccacgatccgagtgctgtccaagatcgcggaggagggtcctgacgctgagttctccgaggaagaggtaggccggttcacagagaccgagctgttcgaacggaaggacggacgctacaggctctcagaggaggggcggaaggtgctggaatccgaaggggtcatagggctgatgctgcacctcgcgggggtctccggtaggtgatccgcgcgatcgccactgtggacgagaacgcttcctacatcgcgttcgtggagacgccgtctgccaacgagaagctgctagacgtaatgtctcgcgagaaatggcgggaactcggtatgttcgtgctggatcatcacgggcagttgtccgaggaaccgtcggctgtggctcaggcttacgagatcgtgaaagagcataccgagtttccgctggtgcgaaaggtcgtcatcgagccgccggtggatgcggatatggtggccgcggtgctgctgctgaagcaggggccggtactcccagaggaggacgtcgaagtgctcgacaagatcgaccggttcgggaaacactatccgtcggatgaggagctcgagagtgctgagtacgcgctggcgatcatgcaagccgtggccgaggtagtgaagaagccgtacccggacaacccggaagagctgaaggagacgttcaagaaagccctgaggaccgtagaacgcgttgtggacgatgagaagtatcgggagaagctagcatcgaagtggctggaggagttccggaagtccgtacgggaggccgaggagagtacggaagtgatcgaggagggagaggtagaggtgggaaacgacaggataaggtggtgcgcggctatctcggaggcgcagaacgccttcacgtatctgtaccgtgaagggtacgatctagtggtcctctactctcccgtgatgaagcgggtgaccgtggggctcgccgatcccgaattacccatcgacctgcgggagttgttcgagtacctgaacgagcatcaccgcgagggttggggtggtcggaagaacatcggaggctcaccgaagaactacgagatcgacgaggaggagttcaaggacatcgtctccttcatccacgagtggcttctaaggttttcatgaacgacctgtaaagacggtctaagaactccacggagtccgcgccaacctcgagcctcaaccactccagaccatgcgccaccttgccgcgtaaagtggtcccgtacggtttggagtacgggcaatcggactcgaaaatcgggagacctacttctcccggtatcagcctcgtccagacctccggaacgcggatcatcggacgcactatggtggtttccgggaagtcgtagtccacatactcggatctcattccacccagctcctcaacgggtcgcaggatgttcagcccttcacctttgatcgctgaagccatggcggtgacgatagcgtcgtccaaggtatgggccaacaccagcttatctccacgttcccgaagctctcgacggcgaatcaaggagcaaatcaggcagggagactcaccgtgttcttcggcgagctcgccgacgtcttccctcggttccacgtactccagttggaaaccgagagacctgcatatttcctcgcagacttcccgaccctcacggccccagatgggatctccatggagcctagtttctacaaggaccggtcgaatacgaagccccagccgtcgggttaacggctcaagcatgaggaggcatgtaacgctgtctttaccgccactgaagccgacgacgacctcctcccgaggttcgaataggtcgtaatcggtcacgacttggtgaaatctcgaggaagctcgctcgacgaccttagagcggacgacctttataccctctctcctcagctcctcccgccgcgagaccgtgagaccggccctcctcgggttcagcgcgaccacagtatcatccaaaatcgcgacgtagcggggatccacgccaacgtctcggagtatctcctcgacgtccaacgctctacccccgggggacgggtgagatgtccctaacgatgctgatgttcttactcaacgtcctggcctacgtgctcagcgtaggaccggatgggatcatccgacctgacgtactgtacagctacggactatacctccacaacatcacggttcatcctgaatgtttgattacttacatgttccttcacgcgaatctcatccatttattgttcaacatgctaggattattgacattcggagtgcaactagagcgtgtactctctacatcagagttcctcgtactttatttactgtccgggttaatgggtggactggcgcagactgcgctaacgccggatgttcctgtagtgggtgcatccgcggccatcttcggattactcgggtgcctcacgatgctaagaccgatgagtatgatgatgttcctgttcatcccgatgcctttggcgttattcgccgtcctttacgcggcactagctctattcgtgatccaatcgggggtcgtcacgcaagtggcgcacgcaggccatctcgtagggatgatagtcggaggggtgctggcactactctacaggccgagtgaagccttgaaggggctactggcggtagcagcgatcaccgcactgctattggcgggctactggttcctgacccacccctgataggggcgaaatgtttattatcaccttgatgttcgggtgcctatggacgaagggcccgcagctcagcctggcagagcgcggccttggcgcggccgtggccccgggttcaaatcccggcgggtccaccaccactaattgttacgagaaacgttacaattaccacatcggacggccccgcccccggagcaccggcccgaaagattaataagttcgtaaggggagggccagcagctgggaggagggcccgcagctcagccaggttagagcgcggggctgataaccccgaggtcccgggttcaaatcccggcgggcccaccaccactaattgttacgagaaccataacaatagatccgacgggcgagtcacctggcgtccaccccggaccgctgggtatcagtgaccgaagacgcaggtgctcacctgatattaaaaggggagccgaaaggcggcaggagtttgccggaaagccttgccggataaaagtgggggaaatcaatggcggccgaaagcatagctaaggccgtgcacgatgtgctagcgacgtggggtgcccaaggaccgggtgcgatcttcttcctagtatgggcagccgtgttagtcgtcggaatgcagttaggtttcatgttcctagaagcaggccaggtacggacgaagaacgtcgtcagcgtcctgatgaagaacctgctagacttgtcgctcggaggtattgtcttcatcttcttcggattcgcactggccttcccggactacgcgcagagcatcggcaagtggattgccaccatgttcacggcgaacccgtggagcgccgatccgatgaaggccgccgatccctacaacctagcgtactgcttcttccagttcgcgttctgcgccacggcggcgaccatcgtctcgggagccgtcgccgagcggatcaacttcaaggcgtgcctggtgatgacggtgctaatcacggggctactgtacccgatcttcgtgctgtggacgtggggcggcggctggatgggcggcgacaccggcctgttcgccaaggtcttcggacagccgtaccacgacttcgccggatcgaccgtggtgcacgcgatcggaggtttcctggcgatggccgccgcctacctgctgggtccgaggatcgggaggttcaagaacggcaagcctgtgccgatcccggggcacaacatcccgcaggcgttcctgggagcgcttttcctggcgattacctggtacggtttcaacgtaggtagctcggcggtgctctacgacccgacgaacgagtcgtggatcagctcgttagtggccactcgcgatgtgtggtggagccgcggcggccgccttcacgacgaggttcgacccactctgggcagccaacggtctgatcgcgggactggtcgcgatctgcgccggatgtgacatcatgagtccgtttggagccctgctcacgggtatcgtggcgggactgatcatcaagccggcgttccgactgctggagaagctggagatcgacgacgtggtcgccgcgtgtccggtacacggattcgcgggcgtttggggagcgatcgcggccggaatcttcggagctgaagctctaggcggcgccggtggtgtgagcctagccgcgcagatcgtcggtgctctcgtgtgcatagcctgggcgctgggctcaggatttgcgaccttctacgtgatcgacaaggtgatcgggctgagagcgacggaagaggaggagaaaggtctggacgagaccgagttcggcgtcagcgcctacccgtacatggagaccagggattgaacgagctgggggtgaaccccgatgtacatgatcgaagccgtcatcaggccggagaagttggacgatgtgaaagaggcgctggacgaggccggctatcctggtatgaccgtgattcacgtgaagggccgtggtcggcagcggggaatcgtacaccggtaccgtgacgaggagtaccggaccgatctcctcgacaagatcctgctgaaggtcgccgttcccaccgaggatgacgtcgagaaggtcatcgacgtcatctgtgagcacgcgaagacgggcaggcccggcgacggtatgatcttcgtcatcccgctcgaggacgccgtccgcgcgcgcaccggagagcgtggggacgacgcactgtccaccgaggagtgatcgatttcttccccctccgccgtaatcgttactggttcaataacgattgtcgcatgcgggaggccgggagctcagctaggagctcagaagcgccactcggctgggtggtgactcgtcgactagctcgaatcccgcgtgctccgcgatctccgccgcgaacttccgtacctcttcgtgcgagggcatgttgtccggcgacatccggaaggccgcccatcccacgcacatgaacgccttcacttcgacatagtccggctcgacgtcggccagcagttcaccgaactcctcggcggtcccctccatgttccagcctttaatcgcagtgatgcggatcaccgtccggcaggagagggaattcagtaactccaacgtcctcatgatccggtcccaggagtccggaatcgtaggtctattgatctgacgatgtagctcctcgttcggtgaatccaaggacacgtacagctgtgtcggctcacgttccagttcctccactcggtcgggtcgcagcccgttggttaccaggaacgtagtgtcaaacccatgggaatgaaaagcgtcgatcagttcgccgattcttgggtacagggtgggttcacctgcgagactgatcgcggcgtgtctgggctcgagggattctttccagcgtttacgagcttcaccttcgaggtgcccgtacccttggaggaagcgtcgctgttgctctacgctctcctctacgatcaggtcgggatcgtccggatcgggtacatcgtgagttcctacggtgagttcgaccggtctccagcagtacacgcagcgctgctgacaccaagctaccgtaggagtcatctgaaggcaccgatgactctccaccccgtagaatttcgccttgtagcagtgcctaccgttcttaatcgcttcccggcaccagtgacacggcttgaccgcggaatgcttcccgactagaccataaccctgcttacggaggaccttcaatacgtccgcgtgtagcaacctagatcacccccgaacggcctttcccgtccgaaaaaattcccggcttaacagtagtcatcatgaggtcggtcgcattcactcgggaagttaccacggctttcctcaatgataataacgtggtcggatgggtaacacgatcttgccaacatcggtgatccgctcgggcggctgctcgtaagattcgaagtcgagttgaacgggattattctgttgttcatgttaaggttaggataacgtccgctcgctaccacggagggggtaccggctgtacgtatatgcgagaatcggcttgatttcatcgaggaattacgcgtcgtgaggaggcactaagtatgaggtaaccggtcatccgatcggcgtcggcgcacgtaacccttatatattctgtcctatgtcgcccaccctcgggaacgggcccgcggtgtagccaggtctatcatgcggggctccagggacccgccgatgacttccatggggtgtgccggacctggtggggagacccctggagcgacgaggcgggtcgaagacaccccgtgacccgggttcaaatcccggcgggcccaccaaggcccaaatcgttatgaaaaccataacggtagctccgtcggtgggagcactcacctgctgctcactctccgagttccttcttgatcaagtgcccgataacggcggtaacagccccgatggccgtggcggtttcgagggagatcctacggccggtgatgtcgaggtggtactcacacgcttcgagtacctcagcgggcagtccacgccgtcctaggccgaaaaccagggttacagatcggggccggaggatttctcgaaccacgtcctcgggttcgatggccttccgctcgtcgggacgacacgtcgtcccgacgatcgtaccgagttgaggtgggaagccacgcactgggtagtcgtaaacctccaacaggttgcgctcggccagcaccagcacctcacgtcccgaagcgccgatagtggtctcctcggcgacgtactcggcgagttcgtgcggagtctccacgcccagatcgtcgagtgggaacccgaagagagcgagcttgaagtcgaaggccacgcagagcggtgctgcccgggcgatcgtccgggcgtgtatctcgtggaagcgccgcgggtcgtaggaattgtacaggccgatagtcaccctgccagcgcgcttaggcatcgctggaagattcccccttggtcactccggtggcgatgaagtgggcgacccggataggttcgggaagacggtggcgagtcgccgtgcgtttgagcactactctagcgacgtcaggttcgactccggcgcactggaagtagactgggggctcgtcccgacgtgttttcacgctgtgaaccgggccggccctgaggactatcttccggcgttcctcggtgcggtccaggttactcagagcggagaccacggaggccacgtcgggccggcgcttgatcacggagatcacgggtaggcccgtttcctcgtgtagctttttaatgtccagaacgttgaaccccgcgaacgtgattccgtcggtcaggattacgcgcagttgaggcctgtgttttgatctgttaaccatctccgcgatccgatcggtgacgtcgagaccgtcgacggtgacctccgtgctcatcacgccgtcgatccactgtccgccacgcatcacgacaccgacaacgagtgccctatcgtcctcgggaccgtagtagccgtcgtcgattcccaacaccctgatctcgggcttcacctctctgagcttcaactttccttctcctccagcgcccccgagaactcctccttcgcttcttccaccagctccagcagttcctctatggcccgctcgagggcttctctggcgtcggcgtcctcatcgacagcccgtatacgcatcttcggcggtacgtaccgttcttcgtcgactttgtgttctttaccgagtatagggtgctcaatcctgtaagttgcgatgattccgtcctgccggtttaaggcccaccttaagagattacataacgtgtggtcctcaccgggcagctcgagtaggacctcatctttatcgtatttcttaacgacaacttcaacctcgggcagtttcacggcaccttcaccccgtcacaagggttcatggaggaagtcctccagggttttacccctacctttacgggctttccggagctcggacgctatctcctctaatttgcgctccgtggacttcgggtcctcccggagctcacaacgtccatcttctccctcccggagtactccccgttcgatggcctcgtaggccaggtccatagggtcgacgtcgtactcgtgggaaaggatggccagcattcgacgcacgggttccgacgccgcgtaaaacctggcctcgcggtaagcctcggcgagttctctaacgaactcgcggagctcactcatgggcgcgttcgtggtgatccacggaccacgaaccctcacccggtagccccggcggcggagtgcgtcgcgcagtagctcggatggtatcttcggggcaccggcttccctgcagatcgtactcagatggagcctaacctgcttctcttcttccgactcggacaggacggtcctgcgaagttctcccaacttgcggatgtgagctttgaccgcggcatgcgggccgaataccttcactttaacccgggtaccgcgaagctccacgacggtgtctacacctcgggcctgagtggcttcgacggcacggaggaatcgctgggcggagtcacggtcggggaaggtgaatgttatctcgcgcttctccatcttaggcatcgctctcggcctcccgcaagtagccggccgcaacttttcttgtctcggtgtgaccgcacacggggcaacggagagtccgacccttcaccttttcgagctcggatctacatcgggtgcagtacgcgaggaccaccccgtattctttacccacagtggacagctgtaccggcatcttggtgctcacgactcgagcgcgaacgatgtctccgggctgaaactcgtcggccagatcctccacgtaggcgtctctgacctttgagatatggatccctcccactccggaggttgggggctcacggtccgtccgatcgtccacgaagcatatcttgacgagaacgacctgctctttcaccgactgtactcgtccgatcaccgaggctccccgtttcaatttcggtggtgtgtccacgtacggttcgacgcgaacctcacgctcctcgagatccacttccactcgcccggtgatggcggcccgaacgacaccaccatcctcgtaggtacctgggccagggtagaacgcctccgccacggttatcttgtcgccgggcagtacgaacttcccgggctccacgtagcgtctcacgacttcctcgtccgggcgctttcgacctgtctcttcacctcctccccgaacagtctcaggaactcctcgaccctgctttcggggacgacgcccccggccgccggtgcgtgtccaccgccctttccgcccacctcggtcgccgcctttctgatcgctcgggctacgtcgatttcctctccctcgactacccgggcgctgatctttccccgtcgaacgcatacgcccacgggtcttcgcttcacgcccgctacgtgggatgcgacccttccggtcatcgcggggtggacgtcgtccatgatcgcgtacgcgacgacttcgttcaggcattccgccacctccctcgcccgacggagcacctcgtgttcctctgccatagcatcgcgagcgagctcatacacttcgtccagctcggagacgggagtctccgggagcttgagcgccaactcccggcggtcttcaccatccatccggatcagcgcgtagtcgagcaggctcgcctccgtgtaaaccttgcgccggtcgtacatcttgagggtctctcggagtactcgggagtactcctcggcgtagtctgtgaaggctgcgtatgcggcgatgagtcgtaggtcacgctcgtgcagatcgaccgtggcccaatagcagagctcggccgcacagagcctggtgtcgtggatgaacacgtcgggtcgcacgtcctcgagtacctggtgatggtctacgacgatcacccgacacccctcggacttggcgtcgtgaatcgccgtctccccggtagaccctaggtccgcggctatcagcacatcacactccggagcgattccggagacgacttcctcgaagttagcgggaggggagaagtacagcacgaagtccgccccgacgttgttcagcacgtgaccgaggatcgcggcgctcgccaacccgtccacgtcgatatccgaaattaccgcgactcgctcgtccttcagtttcttcaggtgggggaccagcgcgttccttacctccttagtggggtccaagggaaacccccttccgttagtcgacctttttaaagactagaaccacagcatctacgtgacggatcctgctccgatgatgagggtacatcgcagggatagggaatcggactactccgatggcgtcacatgtagcccccaattcacgggcacgccgcttccaaaactcttccgtacccgcgcgatggagggagaccacaccggatgacgcctccagggcgacctctacgaacggtcgatcggcgccgcgccgctgggctccgaagggaggattcattatagtaacgtcgtactgatcctcgggctcgaaatcccggacgtccgcctcgacgacttccactctgtcctcgacgccggcccttttcacgttcctccgtgccacctcaacggccttcgagtcgacctccacacacgtgacctcgcacgccccggccagcgccgcaccgatacctatcctacccgtaccggctccgaggtcgagtacgcgcgagcattcgagcccgaactcccgatcggcgatcgagagcagtactcggactatctccccgggagtttcgtactgctcgagagatagtttcggttccggaaatccctccaacccgtcgagctccatcgccagtcggcgatcgatcaaagcctttcacgcaccctccgctcccgttcggcctccttccaccactctggtcctttacccaaacgctcctcgggatccatccgcacgaacttcttctccccgcagtacgggcactcaggaggagttcgctttcgacccaccctcttaccgcacgatgcgcagattatgtgttccggcaacatcatccccccaattgggggtacgtccgagatgcccgcgggtccggtgcacttggtgtacggagtcctattggcggtgacgtcgtacccacagaacccggaatacggcgggatgatcgtgtacgcgtcattagcaccggacttcgccacagcggcctacaacgaccggtactcggacttgaggtacgtggattaccggtgggcccacgatcccacgcacgtttacgattacgcatctgtgatagttgagcggacgacatccaggacgcttcagggggtcgacgagaaggtggccctatggtgtgcggaaacgggtattgccagtcatcttctcttagacctttacacacatgtcaagacatcgccgattaaggaatggagggaacaagccggcatcaggacggtgctccaggagttttactacccatggcaggagaacgcggtggagttcgcacgttgggcactgggacgggctattcgggtgttcggtaacccggacgagttctggcggtacgtagacggggcatgcgcggtcgcggaacagctcatgggcgactacgtcatcagcgcttacctcaggaggctatcggaacgctacttcggagatcccgacttgcacctggccgactggttgagatggttctatcgaaattacggttgggaagaaaacgccacggacgcgttcattatcgatggtgtaagaattccggccgatccggtggaacttttgtcgtggattagtcagtgggatccgcgggtagtccccatgcggccacctcagtcgggcggtggtgggtcgttgctcttaccggtgttcccggtaccgccggtacgccggcgctagcccggcacccagatgtatttcttaccggccttgtacaccgcaccgccgagcttcttcatgtgaccgagttgtgcaccaccgcgtttcgccctagcgacctccttgaactgctccactttgagtccggaaggggtgcggtagatcttcgtgacggtaaccttacccgtggtagtcttggtgatgatagtggcctccgacgttttcggactgaggatcttggtgagaccgtagctggaggacatggtgatgatgaacgctagggcgaaaaccatcgccgcgtcgaacaggttggcgacaccggtcagtgggtcgtcatcgttgtcaccgccgtccaggaacctcctacgacgccgtcgtctcagataccggggcaacgtcatcccccgaactcgcgttggagtatagtctcagccaggaattcgagatccgagacgtcctttcggtaccatctagatctgaacaatgtgatcacgtaacaagctccagcggatgccagaccgactaccgtggtcgcgaacgccgtgatcagagacgtcgctaagcccgcgatgttacctttagccagctgctccaatcccggtcccaaggggatcagcgtccccatcagtcccaacatgggacctagacgcacgacaatcctcgtcctactgactttgctagccaggaagttttcgaggttctccagctccttttcgaccttcaaactggcctcgtccgccgaatcggacttttcgacgatcttctcgactctcctcaggaactccgagaagtggggaggaagtcgcttcacgtccggaaacttatctgcgatctgttcgagatccttcctggtaaacctgggccggtaggccacctcacggaggaatatagccagctccatcagagagtaagccaagaacagcagcaacagtactatcgtcgggtaaaacaacagctccattaccacgtacagagcctgagttatcgccgtcgcgatgctaaccattcgatcaccgccctgatgatatcgtcgatcgggttatccggtgggtagtttcctcgtgaagccttgcgcaccgcccataggtacccgaacgccatcaaagccaggaacagtaacgcccatgggcctattttcgaagggctcggaagggccagcttgagtttaggtgctcgcttccataacggataggcccacgcgataatccccgtgatcacgaaaaggagtcctactaagttctcgaggccactaagggccacggccgggggaactttgaggacctcgataaccgcatcggcgacgatcaaggtggcgtacgccgtcgaaacgaagcaagtccagagtaccaaggcggcttgggtgacgttaagggcgcctatctcggcgtacatggcgatcgatagggccactccggtcaggcagatcggacacggaacggccacgacgaatgctcctagcttagagagatccttcgctgaaccttctaccgcccacttacgggctatgaatattcccaatccgatgagaaacaaccccagcaaggcgtgaccgaggagagcgtacctctgcatggcgagcgccgttttcatgaacttggaaaccaggtgactcaggcctattatcgccggtattagtatcccggaaagcgctgcgataaccatcgccccacgacgtaactggaagcccgcgaaccctattcctaaccccgtcttcaaccccacgatgaacacgaagaacgctatcgcaagcgcgtagatcgggttatcggcgaaggccggaacgatcatccacgaggtcagcgcggctacgatcaccgaagatgtcacggcgaggagggtgactattttgaagggtgatacgccgagatcacgtgagatgcgataagatggatacaccagagcgacggaggacgccgcgatagccccggcggtcacgtcgagaaggccgacgaggagggcgactccggaaagcgctgtcccttccaacacggtgcgaatgacctcacggcgctttttacgggcccctaacacgcgtgtcagcattacccctgtgccgactccgatggcggccgcggccatcccgtaaacggccccgtaggttagggcttccgacacaccgacggagtggtacctgagcattagtgccgcgctggcacctagataggtggtgaaggccgcgatcacaccgtggaacacccgtcattcccccgtcaggggccgaatgcgccgaccagagggaataggatgttaaacggaggtaagtaaagtaagttttctgacaactcatagtacttgaacttaggcagcttcgaagtgatctcctgaaccagccaccgcttccgttcagtgagcgtccgcagtaccggagttaaagcatcgatttcgcgcaggtcgtccgtgaccccgggcgcacgcttctcaacacggtcttcggcacggtgtagcgctgaaagagcccgcgagacgttcctctcagctcgatcgagaccggtaacacctttcgccctcgccttccggattttcagccgagcgagctcgagtttgtgctcagcactgcggatagcggaaagcaactccaaccggtctcgtcccggatcattcccaacacggagcgtgttatcgtacaaggcagccttgtaggccaaatacggcgatgaggcgagtacggtagcaacatctttagtagctccgtcgatgtcactaacagcggactgtagtctctccatgcggagatacttctggaatcggtggtcgaacgatccatgaacgagtgccggggatatcacgagggtggccacgagcgctgctgtcaccttccatcgcaacgccgctacccctcgtgttaccccgtggctgccacgtaacaagctataatcgttttgcggtatcgggttatgtgtgggcgtggacgtagatccagctgttgttaccctcgtcggtgtgctcagtcacggtgtagccgacggtcccgtaatacagggccgtgagtaacttaccgactttccgctcgactcgatctccctcgtctaggatgtgctcgtcgtcgaaaagcacgtcaaaccacaggaggagctcgtcgtaagccactgtctgagcgtactcgcccattcccaggaacaaccgcccgtcttggaacatttccgttactatctcgcctatcctactcaccccctggcacgtccgggtgctaagcggaccaggtctaagtaggaagccacttcgcgcagattgttcggctttatcagtgcgccgcttctcttgacgtgctcaatgaacctgcggtacgtcggatggctggaaagcgtgccggaatctccgatacaaatgagtttccgcctaggcctggtgatcgcgacgttcagtctcctcatgtcccttaggaaccctacttcacccttaggattgcttcggacgaaggacacgatcacggcttccttctctcgaccctggaacccgtcgactgtgttcacctcgacgtcgccgagcccgagttcgtcgagggacttcgaaatcaggtccacttggtcgtcgtacggactgatcacggctagatcctcctgagacaacccctgccgaaccagttgttccgacagaaaggcgactatcgcggcttccatcggattttcacgggatttggatccgggacggcgtcgctccctccgcaaacgctcgggtaagcgcgaggtgtccacgaaccccagcggctccttggggtgtaggacgtcagcccagggtctgccgacttcgggatcgccgacacctaagtcctcgagcgtgtgacgacggacgctcgagtgggcctcgagcttcccgttgtaaaactctcggttcgggaattccatgatgttctcgtgcatcctgtactgcactctcagcatcctggagagcttcgggtgcttttcgatcaaacgctcgaagagcgtgcgagagagctccggctgggcctcttcactgaggatggtcgggggcaactgcttgtgatccccggccatgatgaacctcttggcccgagagatcggaatgagcgctgaaggttccgtggcttgcgatccttcgtcgactacggcgacgtcgaactcgatatcttcgaggaactccagccctgcactggcgttcgtagtgaccacgacttcagcctcctctagtacttcccggacggcacgctcttccagtcgctccgcctcctcgaagagtttctggactttcctgttgatgtggatccacttagccatgctctgaattacgcgtggtgggaccccgcgggctcccttgccttccctcgcaaggtagagtatggtctcgtcggacatcccccgacgccacctcggcaccgggcgctggtaccggtcacgcttctcgatgagcctgtaagcgcgctcccggagacgctccgccttcctgtacagtgggtggttttccacgatcgcgctaagtgtccgctccttcagtttcttggagacacgggccggatgtccgaccctaacggcctccacaccacgctctaccagatattccaggatgttgtccgctgcgacgttggactcggccgtcgcgaggaccttgttaccacgccggacctcttgaacgatcacctcggtgattgtccgggtcttaccagtacccggagggccgtgaattaggaagaaatccggcgcccctagtgcgtgttctacggcctcccgttgggaatagttgaggtcagtatcgacgaagtccacgtctataggctccgcgtcgctcggattcttaagtccgatgatcgtgttcctgagttctcggagtctaccctcagcgtgtctgatccgttctagcgcctccatcatacgctggaaagttacatcgttagcgtataggtcgatcctgatccccttacccacggcccacttgggtggaggactgtcgaaagccaccgtaatcgagcgcttggtcttctccacgacggttcccgtgagatcgctcttcagtggatcgccgcgactcacgaggaccagatcgcccacggatatttgcgtatctatctctttagaccggccgtacttcaccaggtagtaacctccgacctcccgacctgccctcgtaccgcgcagaccgagtactgccctccccttcttttcacgctccttgcctgagagtttcctgatttcctcttccatcgccttcatctcggcttcccgctccagctggactagcctctggaacctcttgacgtaggcgtctactaccttgatctcctccgattcctccctcgtaggctccctcacgtcagcatgtcttaggagacgctgagccgcacgaggctcgactcggcacagcgcggctcggttggccagccagattttaccgacttcgtggggcctcacaccgcgtgagaatagcgtatccagaacgtctttcggagagtcccccggactaaacccttcgatcaacacttccttcatggttacaccctcggtggacactacatcctcaggggggcaccgtccagtgagaccgtttctgagccggctgcgcgcccttatctcgtacataaagaaaacgtacgatcgcgttgcggtagcctactccggaggtactgatagctcggtactcctgtacgctgctgtcaaggcgttaggacggaaaaacgtggtcgcctgcacggcgtgtttgccgtacgtagtgaacgtgtgtccaccgactcctatggatgtgaagcaaatcaggatccgccccgacgtggaggatgtcctccgagagggtagagacgaacacccgtgttacctgtgcaagcgggcaatttacgaagcgatacacgaaaccatcggaggtgtggatggagtgctggacggtaccaacgtctcggaattaaccaggggccgccctggcctccgagcgttgtacgaactcgacgttgacgtcccgatgatcaagtgtggactcggtgatcagacaacgtccgtgctcgccgcctacctgaacctccgagcacgctccggagcgtgctcactcgtactgtctccggagtggcccgacgtcgaagtgaacgacccaggaaagctgaaccggacagcccgactgcgcaagccacagtcggaaaggtggtccctttcggagtgtctggagttcacgatccatgcgccgttacccgaaagacgaagggagagatacgagtgtgtccgtcgaggggacgcgctagtgttccgagtactgagtggaaaagtcaccgaagccttagcttcgtacttccgagagtgctggaacgtgtaagaattcgtacctcactcgatcgagatgtctattatcagagggtaaaaccgggaagacttagcctcgttgaagtcggagactggaagaggggctaggatagcccgtttcacgaactctactaacacgggttccacttgaaacgtcctgtgcacctcgccaccgaccatcgggacttggttctccagagtagtgcggaggagctcaccgagttctcttggatcttcggagactatcggcacgatcttgaccttgatctcagactccagggtacggaccacacgcttgaaccgacgatccttgagacagcttaccacgatgaggtaatcgagtttcagttcccggaggaacttccactgggtccactggatagcgtgctttccaccgcgtgggtccctccataacggcttccccttggtgaacttccaaagataagagaagtctagtgcaggagcatctagcatcgacgataggtacacaccgtagagtgcggagatcgtgtcggtgactgcgacagcgactggtgcttggtcccaaagctcatcggcaaccgctgcctcgacaccccacgagcacacgttcggcattcgcttccaacctcgaaggggttcggctccgacgtgaccgcttttgtatcccatcacggcgatcgattcgggtgccagagaccgaagcgcatcggcggaatacggtgaggctacctgatatcccgaagccttcggggggaaaccctcgagaaggtcgctcgtcggtcccacggcgttgtgagaggctaagaggagggggagccggaccgccgtgaggtcttccagtatcttacgcgtcttcctgcggaggattcccgctaggcataatgtcttgcatatctcgtacagtgggtacgccacgacggccgcggtgcccttcctcgtagagtacatctccaggaacgcctcggcggagaccccgctatgttcctcggccgatgattcctcatgagattccctcgacggttcttcctccacttcatcttgtctcgccttttccgagccctcttccgtgctgcgggagctgctctccattggtcccccgatagtctccgcgactgctgttggatctacttcggtcgcgtcgatcgtttgccttatcttcatcagccggtcccgtacgaccttactctctcgacggaagatcctaccgatcatcccggttcacctcgtgagcctgaacatctcctcgactacttcttcgacctgagagataaggtcggggtccagctccactctgagcggttccgggacgtgtcgggcctcgagtactctttcgactttttcccccgtgttgattttcatatcgggacacaccatatggccgggaacgatgacttcggtgcccgtttcgcgacgtatcctgaaggcgagaccttcctcggtccccattacgattttactggcgtcctccttttcacagtattgacgtatttgggacgtggagccgacgaagtccgccatcgcgcatacttcaagagggcattccgggtgtaccacgacggcggcatccggatgttgagaacacagttcgcgtaggtcggaaggggacagcgagtgatggacggggcagcaaccgtgctcggggaacgggattacctccttgtccggcacgtgtttctgcacccaggccgctaggttaccgtcgggaacgaagatgatcttatcctcggggagtgaggacacgacttcgacggcgttagcactagtgcacatcacgtcggcctcagccttcacttcggcgctcgtgttgacgtacacgaccacggcggcgtccggatgctcgcggcgaaactctcgcagttctttcgccctgagccgcatggccatgccgcacgcagcgcggtgatcgggcacgacgacttcacggtcggggttgagtgccttcacaacctccgccatgaagtccactccgcacattacgatacgatcagcgtcgatctccctggcctccaaggccagctccagcgaatccccgacggagtccgccataagctgcacgtcgggccgctggtaattgtgagccagcacgaacgtctccacggagccctaccccctctaccccaacggctcgaactcgaccccgaatacgcgttccggaatttcgatcatcacctcggacacgaggtctgggtcgatggtacggaggattctggccgccttgggcaccgcacggagcggtagggcggcgttggggcgcctgggatcgtccaagtagtcgctctccagcatgaactccggaccgtgctccgcggcttcccgcactgatcgtcgagatgcgggtactgagggccatatccccacgtttcgggccgcggagacgtcgggtgtcgcccgatgcctcacgaacctgtcgaagtcgaacccgacgtcttttaagtactcgtacagtcgcatgtagtgcttcctagaggctttgggtccgtggtaaattaccggtaggtccagatctttggccagctctaggaacctgacgaataccttgtgacacacacgcttcacctcggctggcacgggataatgcggatgacctacttcacccactgcaactacctcttcgtactcggcggcgaatttctcgatgagatcgcacacggtttccgcgacgttcagcacctcctcttcgggatgttcttcagccagcgtcgccacctcggccggatgccaacctaaggccgcatatcccctcagcggatactcgagcctgccgtaccggactccttcgaggtgtaaccggtaggcgcgctcgaagtcctctctaccgtatccgtggattcgatagctccgaagcgttagaactggagatacgaacccggtacctccagcccgatggaacttctcaaagaccttgtacccgtcacctttcaccggattgaagtggagatgtacgtcagtagccacctgcaatcgatcaccccggatcatcatgaaggctggcttaaatcggatgacgtgagggctcggcgtcatcccggccgatcatccgtctcccgagtggtggccttcttcatcgcccgggggttagcggagtgtgggtagaattgagacgtaaatacggccgggatcgcggtcacgcaccgatgtcggaggaggacgtgctgcgggtcaagcccaaggaacgtcccggagtggtgttcgtaaccccggatggtcgagttcacgcggacttaggacacgtgaggatggtggaagacaccgtgacgctgcactccgatcccacggagcccccgggtccggacaacccatccgtgatcgtgccggagcacgtgctggcggcactttacgtttcgggatacgccggcgcggtagtcgagatccgtggtgatccgggacacgcggagcacgtgtggagggccgattgttacctgagggaggccgtggaggagttgggtggtccagccgacccacccgagatgggggagcccgcggctaaaagggcgttcatccgcgaaggagaagccccgtctacggttaggaacgtggagggaaggatcgaaccggcggaagagttcgaagtgcgtgtaggtggtgaggaggtttcggttcacgatctcatgaccgtcagacgtgggaacgtgagcaacaagacccccgagcacgcgggcctagacgtggtagcagacgtcgcgatgttggcggggacggcgtgtgctagggtggagatatcacgacccacggaggtaacctcgatacatcctaccgatctctacctggcgacggccgcaaagcacggaattcgcgtctgttcgctcaacgtggggaggatgcggggcgccgtaaacttggaggagggggagaccgtccgtgtcggcaccgatctcaggtacgaggtttgcatcaccgaagaaccggtagcatctgagatcaagataggtgacgtaacgctggtccgcgagggaggtaagttccgggtcgtagagcctggaacggttcggctcggagatgaggtggtggaagtaggttgatcgacatttcgtccctgtcatgggccgtagcgctcggagtagttcgaggtctctacgtgttcgcgggatcgttcatcgcggcggccgtctaccggtacgtggcggaggagaggatccgaatgacgacctccgccttcatgggtcttttaaccgccgggttcgcggccggccccaaagaactcacggcactcacgtaccaaaatccgaacgtggagatgatcgcgtgggctatcgccaccttgttcgcgatacccgccaggacctacggggacgctatcggtgagaggattctccgggcgaggatacgagcatcgatgaaccccagaactaaggtttacaggctccccgagaaccccaacgagatcaaggatatccccggagaaccacccgcgcccatggaggtcaaagaacggatcgcgggacgcgagtacgagttccctcgaggcactcctaaggaggaagttgagcgagtgatcaagcgagatttggagagcgagaccgggataggtcgcgccgtagtccgcgtgcgaaacggcgacgtcgaggtactcgtagcgggtgcgaagcccccggtctcgcacacgctccctccggacaaggtcgccgtttccgtggaaccactaggcggcgccatccacatcggagagggagatcgtgtacgtgtgttcgtggacggtcgcgagctgggtgaagcggaggtatggcggcgggtagatgatcgggtagtattggtgatggaagaacgcactgccgaagagctgctgaaggagatcactcaaggcaagcaggtgtcccttatggcggtgagaggggagggaagttgaagcgtgagcgcgttcggatcgagggaggctcgatcagggtagacggaccgtcccgggcgcgagtaattcgaggtgaagcgaccacgaacaaaggtaccgaagtgagtgaaggcgaagaactcgtgatcaggcgtggggagcgactgacgctcaccaccgactcggagctcgagctggagctagtcctgggaaccggtgccggctactcggtcgaagaggacggcgtcgaaataccatcggactggaaagagttggccgaggagctggccgatcacggtggaacgccggtttgcatggtgatcggtcctcaggactccggcaagacgacgctagttaccttcatcgccaacgagctcgtggagcgcgggctcaaggtaggtatcgtcgacgccgatgtagggcagtcggatgtcgggcctccggcggtcgtctccttaggtatcgtcgaggataccgtccacgacctctccgaggtagagatgagacacgggtacttcgtcgggtcgatcaccccatcgggtcacctactccagaccaccgtagggactcgaaggatggtagacctcgcactagctgaagggacggatgtcgtgctcatcgatacctcggggatggttcacggcggacctgctagagcccttaaactccacaaggtcgatgcgatcagaccctcacacgtggcgttcctggaccgtgacggtcaggtgtcacacatcaagcgtatggtgaagtccttgaagtacattaaggtgcacgacctcgcggtgcctgatgccgtgaaggacgtcgaacggaaggaccgtattcgacgtagagagcgcgtactgcgcgagttcttcgaggaacgggagatcctggagctcgacctggaggaagtctccgtacagcgggcgtttataggaacgggtgagccggtggacttggaggaggagagtgaactatccgcactgatcaaagcggtatccggtgtcgaacccgagatattgcacgcggagagagcaccggatgccgttgttttggtcgttaaagaccaagccggtcgaatcgtgggacgcggcggccgacatgcccgagagcttaggcggctgcttaacgtccgagagttcgtcgtagtcaacgaggaggaacttcagggagtgctggtaggactgtgtgacggggccggtgacctgctcggtatcggcgtgattcgagagatcgacttcgcctccggagaactgaaagtcgagggcaggttactccgcgacaggacgattcgcgtcgttcagctgggctcgcttaaagtggacccggagacagggtctcacgagcctatgaacgtacgagtttgactccagtcctgaagggttaagctttcggggctgtgacgagaatgtacgtggggatcgatcacggtacctcggggatcaaagttgcagcgtacgacggtgaaggagacccggagtttttaggcaaagcaccgagacggaaggtggccgagcgtgggttgctccgatccctccccgacgaagcccggagggcagtagaggaggccgagtgcatctgtctgaactatgggatgggcgacgcgctcacggagttcacgccgctagaggaagcggaggatctcggcgtaggatacggactacgtgataccagcggagcggggcgggagttcggcgccgggagacgtatggtcgaggagctgtcagagctcggcgttgaggcctatctagcaccgggtattcatcgggacttaccgcggctggacggggcattccgagtgttctcacacgtagcgagcggtgagaagctgggaacagcgaggctcgcactcgagttatcctcctcgaaggatatcgtggtgtgtgacacaagctcgaacacagtttccgtggtagtgaaggacggcgaagtaatcggcggaatcgacgcgtgcctcggcgctccgggcgtattgcagggaccgttggacttggaggccattcgcaggatcgacgcgggtgaactgtcggccaacggggcgttttcaaccggagggatcgttaagatcgtcaactgcgccggggaagatcccgagagcgcggtagaggaattcatccagaggtgtggcaaggaagagaaggagtggctggcacggctggtcgcttgggaggtggcggggttaggcgtcgtctacgactgcgacgaggcgtggatcggaggtacgttgtcgggagacgacgaattcatgggggtgctggagagagtcctgagcaaggcttttaacaaggtcgccgggctaccgcccgagtcggcttcgatgggactagccctgatcgccgcagacatagcctccggagcccggtcggtgttgggggtgcgaatttctcgccgcccctgatttcatacctggggccgccaggcacgttcacagaggaggcggctgagcggttttctgaggaagaacttgggggaaacggaaagctccagtctgccaggactattaccgcggttttctcacgtgtagagcgaggtgaggcggattacggtgtagttccgtgggagaattcactggagggatccgtaggagagactttggataacttcctgcataggagcgtacgcgtgttcggcgagctggtgttaccgatcgtgcatgcactgatgtccggatccgaaccggacgaccgtgaacccgtggtctactcgcacccccaggcgtatgagcaggcgcgggaaacgctgcgagagttactcggtaaccacgagttcgtacccacggcgagcaccgccgaagctgccaaactggcgtcgaaggagggtgcttacgctctaggtccaccgaggctcgcggagcggttcggattggacataatggaggagataagactggaaaataacgagaccaggttcgcgatcatctcgaggcgcgatagagccccgactaaagaggacaaaacatccgtggtgttctcggtaaccgatcgtccgggtgctctacgtgagattttgggtatcttcgcggatcgaggtatcaacctcactaagatcgaatctcgacccgcgaagagagggttaggagactacgttttcttcctggactttgaggggcacaggatgctctatcccgggtccgaagcgttggcagaactccgagaaagaacgccgttttccaaggtgttggggtcgtaccccaaggttttcccgtagggggttaggaccgtgatcgagatcagaatacacgggagaggcggccaaggagccgtcaccgcggccgagatcctggcgatcgcggcgaaggaggatgggaagtactcccaagcgttcccgtttttcggtgtggaacgccgtggagcgccagtgacggccttcgcccggatcgatgacgagttcatcaagattcgatcgcagatatacgagccggaccacgtgatagtactcgactccagcctgctggccgtagtagacgttaccgaaggtctaccggaggacggtctcatcgttatcaacgctagggaggaggagctagacaagatcatggagaagttcgaggattccgacgtctacactgtggacgcgacccagatcgcgctggacgagttaggtgtccctatcgtgaacaccgcgatggtcggtgcctatctgaaggcttccgatatcctcactctcgatgccgtgaagaaggccattcatgcacgcttctcgggagagatcgccgagaaaaacgtcagagccgttgaacgagcctaccgggaggtgaaggcagttgggtaatgaagaatttacgataggggccgtagtgcgagagccgggaagtaccaagaggaataagaccggcagatggcgcgtgttcaggcccgtactagatcaggagaagtgtatgaactgcggtctgtgcttcatgtactgcccggacgggtgcattaggccctcggacgatggctacgttatcgactatgattactgtaaagggtgtggaatctgcgaaagcgtgtgtcctgtaaatgcgatcgaaatggtactggaggagggttgaggggagataccgatgactgaagttcatgtgatcaacgggaattacgccgtagccgaagcggttaggatggtggacgtcgacgtcattgcggcgtacccgatcacaccccaaacacccatcgtagaatacctttccgagttcgtatctaacggggaactggacgccgagttcatacacgtagagtccgagcacagcgcgatcagcgccgtgctcggtgcctcggcgactggagcccgcgtgttcactgcgacggcgtctcaaggtctcgcccttatgcacgagatcctgttcatcgcttcaggactcaggttaccgatcgtgatggccgtcgcgaaccgcgcgctctcagctccgatcaacatctggtgcgatcactccgactccgtggcgcaacgggacacgtcgtggatccagctgtactgtgagtctaatcaagaggtattcgacaccgtagtgcaagcctaccggatcgcggaacacgaagacgtcctcttacccgtgatggtatgcctggacgggttcacgttatcccacaccttggaacccgtcgaacttccggaagaggaagaggtacgatcgttcgtcggtaagtacgagccaacccactgttacctagaccccgaagacccgatgacgctagggcctgtaggtggccctgacagctacatggagttcaagaagatgcagcacgatgcgatggaaaaggcacgtgaggttataggagaggtcaacagggagttctcggacgagttcgggcgttcctacggtgacgggctaatcgaggagtacaatacagaggacgctgattacgtggtgatcgcgatgggatccgtctgcgggaccgtcaagcacgtgatagatgaggagcgcccggacgtgggtctggtcagggtgaaggcttaccgcccgttcccaggcgaccggatagtggaggtaatccaggacaaggaaggcgtcgtgactatcgatcgcgcacattcgtacggggcgatgccgccgctgtggacggacgtcaaagctcacgcaccggacgtcgacgtatcgtcgaccatcgcgggtctcggtggccgcgacatacgcccacaggacgtgctcgagataatcaaggtggcagaggaagggaagggtatggacgaacccgtctggatcaacgtgaaggtgtgagggggaccatccgtggggaacaagagacgcgtccccatcccggaggaggaactcatggctcccggccatcgagcgtgtgcgggctgcggatccgccctctgcgcgcgcctctgcatgaaggccctcggtaaagacaccgtggtagtcatgccgacggggtgcatcgaggtcgtcacgacgccgtacccggagaccgcttgggaagtaccgtggatccacgtggcgttcgagaacgccgccgccgtcgcatccggtatcgaacgcgcattgaaggcgttggggaaggaggacgtcaccgttgccgtgctcgcgggcgacggtggaaccgtggacataggatttcaggcgctatcgggaatgatcgagcgaggtcacaatatcgtctacatctgttacgacaacgaggcttacatgaacacaggagtacagcggagcggtgcgacaccgtacttcgccgcgactaccacaacaccgccgggtaagatctggaagggagagatgcgacctaagaaggacatcccgaagatcatcgccgcgcacggagcgccgtacgttgcgacggcgtgcgtatcccatccccaggacctcatcaagaaggtcaagaaggcgaaggaagtggaaggaccggcgtacgtccacgtactgtgcccgtgtccaccgggttgggggcatgattcgtcggagactatcgagatcgcgaagctggcagtggagacggggatgtgggtgctatacgaaatcgagaacggggagttccgcatcacctatcgtccgaaggagcgcaagccggtgaaggagtacctcaagcgtcagaagcggttccaacacctgagcgaggacgacatagagaagatccaaaggatggtggacgagcagtggaaggagctcgaagggaaggagtaaaggcttgggtcggtctacccggctgtataggttgcgttctgtgcgcggaggcgtgtccgatcggcgccatagagatcgtcgacggccggccgcagaagtgtatacactgtgacccggagcgggcgatgtgcgcgcgggcttgcccccatcacgcgatcgttcaggtgtgcgaaacgctcgtggtggaccgagaccgatgtaatgggtgcggaaagtgtgccgaggcctgcccagtaggcgggatattcatccgcgaggacgtcgccgtgaagtgtgacaactgcttggaccgagactaccccgcgtgtgtggaagtatgtccagtggccggcgcggacgtggctcccgtgaacgagcgagttttatggagacgatcccgagctgcccgcacactccgaaacttgccggggagtgggggtcatgcccgacgactcggatcgagagctgctcgaaagcatagccgaagccacagtcgaagcgttgcgcgtggccgaaactaagcttccggatgacgtgctggagagggtcgaacgggccctggaggaggaagaagacgaccatgcccggatgatgctggaggcgatccttgagaacgtccgcatcgccgaggagaaaggactaccgatgtgccaagacaccggactgatcacggtctttgcggagatcggccgcgagttcccgctgaggctggccgggaccatccgggacgggatcgaggagggtatccggcgggccacggaggagataccacttcgacctaacgtggtccatccgatcagtagggagaacacaggtgataacaccggagatcgtgtacccatcgtgcggttccttccgaccaaaggggaggagttgaggctccacttcctgcccaaaggtttcgggtccgagaactccagcgccgtgactcggttattacccacggaagggttggaaggcgtccgcgagttcgtgatcaagaccgtgcgcgaggccggcgggatgccgtgcccaccgatcgtgctgggcgtgggagtcggaggtacgatcgatgaggccgcgcacttggccaagctggccctgttccgaccactgaacgtcaggaatccggacccggagatcgcgaagctggaggaagagctactggaggagatcaaccggctgggcgtaggtccaatgggtctcgggggtcgaactacggcactggcggtcaacgtcgagctagcttacacccacacggccgggctgccggtggcagtgaatgtacagtgctgggcggcccggagggcgaccgcgatcgtgtacccggacggcttcttcgaggtcactcaacgcgagtatccgcgggggtaatcgattgaccgaacaccacctggaagtccctctcgagaaggaggaacggctcaccgagctggaggtaggcgatgtagtgtacctgagcggaaccataatcacggctcgcgacaaagcccaccagcggattttcgaggaaggtgaggaaccccccgtagatctcgaaggagccgccgtgttccacgcgggtcccgtggtcaggcgcgtcgacgacggctacgagctggtggtgataggccccacgacgagcacgcggatggcgaagtacctcgaggatatcgtggatgcgggcgtgaagttgatcgtcgggaagggaggcatgggtccagacgcccccgaggtgatgaaggatcgcgccgtatacctcacggcgccgggagggtgcgccgcgctccttgccgagcgggtgaaaagcatccgagaggtgcactggttggacctcggagtccccgaagcgatatgggtcctggaggtggaggagttcggcccgctaatagtcaccgtggacgcgcacggtaacgagctggcgggtgagtgaaccgtgtacgtcggccggtttttactcgccgggaagctggaggacgggacaccgatcgccgtatacggcgtctgcagtcgcagcttctcggatcgacgtatcgaggtccgtgagggtgcggcgttcgtggttcctgaagatccgagctacatcaccgagaacccgtacgtgacctacacctgcgcccggatcgtcgacgagttcctggtgctcaccaacggcgcccagacagatcctatcgcggacaagctggagtcgggagtaccacccagggaggcgctcgtatccgtcaccttcgcgatggattacgaacacgacgagtacaatacaccgaggatctccctgatcacggacggcgaaacgttctggctaggacgggtcgcaccggaggaagtgtacttcagggtcatgaagccgaaggacggtgaggggtacttactgtccgtgtacggggagtacgccgaggtcccgtcgaaacccaacatgaccctcgatcgggaggacccgctggagtgcgatccggtaccgtccttcgagcactacgtttgctcggtgatcgcacggcacgatggcggccgttggtccctcgaggccaggtgagtcagcctacctccaacagcctcgcgtttccgggcggcatagccctcatcacgtcgtctacagtcagataacggcgtaggttctccacctccttcttgaacagctcgaagagcctcctggcgacgtcggatttgcgctcgtttccaggctccaagacgccgtacgtcatgcagtgtttcttcacggcggagactggtccgcccattaccctgtacccaccctccacctcttggacaccgattgccaccttcagctccgttcgacggaaccagttacgtttaccgcggatgatagcacctccgtggggggcctcggcggacttgtctacctgatcggccgtcacccagtaaacatcagcggctttaaggccccaacgccacgctcgggaatacgaagccgcgaagatcgccgcctcgcgtagggtcgtctccgggacctcctcgccctcagtcttgatcacgacatgtggagctccgtgcacgtgagcgtggacgaggatgtcgtgctcctccaggtagcgccgcagtatgatctcgttggtatgagcgtccgagccgcctatgactacgaaaccgtcggaagagatgaaccacctgaaccgctcgtaccagtccttcttgcgacgcttcgtgagctcgacggtcagttcctcgagctccacctcgggtgggccctcttcgagtagcttctcgagttcgcgctcctgctctcgaagaacctcctgagcgcgctcggccttacgttctagctccttcgcacgatcgaaaagcttggaagccgtggagtgaacgtccgagtcgatcggtacgggcacggttacctcgccgttctcacccggcaacctgaggatcacgcgacggttctcaacgtcgatgtcggctatcctctccacttcctcgatgccggaacccttagcctcttggatcctccgcttgatctcgtccagcgagtaccccttgcgttctgccttccggagctcgctcaggatcccgtcgacgaggttgtagttcaggtacagcgcgttggcccgcccacggagtttctccgcctttgtacgtagctgctcgatgctcgagcgctgcctctcgatcgtccgctcgaggcgacgtttctcacgctcccattcctcccgcacttcgcgttccttctccgccaggaacttcgtcacgtaatactcgtctaaggcacgctggaaggtgtcctgctcctccatctcgagctcatcggagtagcgttcgagcggcaccggcgtgacgtccacgtaatctcgctcggtcgtcctatagagtgtgggccgtagatctccctcggatatctgctctaggaggtcccggagcgtttcgtagagctcctctagctcatcctcctcgaactcggatgcgtgggactcccgacgctcgtacagcccggccctcaggagcacctcttcggcgtagaggcccccgagacccacgtctacggcgagcgtccggacgagatcgcggtcggcctcgagtagtagttccaggaaggcgtcacggtcgagctcgtaaggatcgggcgggccttcgggtggctcgtacacttcaccgggcacgacggccctgttacggaaccgtctggccggaaaagcccgctcaatgacgttgttctcgtccgttacggcgagcgtacctttggggagcagctcgacatggaccctacggcccgaacgcaggtcgaagcgtaggattctatcgaaacctagctgggtgacgcgctcgatgcggtcgccggaaagggtgtttcggagggcctgggaaacggaggtgggttggtcggggctgggttttgggcgccaggttaggtgtacacgcatccccggttcccagaccagataatgggagcccacgcccgggacgtgaaccttgaccttcagctcgcgctctcctacctggtatatcttgtctatcaaggccccctcgagcaaggaatctagttcgcgggccgtggcgcgtacgtcgaaggatgtcatcgcctccttggaccacgccttcaggccgtgtgacccccggtgggatcaccgtcggatcacgcggtccttctcttgatcttcgccttgacggcctccttcctccggactgtctcctccttctcctcctccccgagtacttcacggaccaggtgccggatggcgttcttgaaggctataatcagatcccagtcgtgggccttgaccgagatgacgttccgtgcgtccttgacgtggatacgtaccgagtacttgtgtcggttaccctcctcgtggtaccgcttgatgtggacctcgacagcctcgatcgacgggcgcatcgaggcgagcttctgaacggccgcggctatcgacttacggaggatcaccagggtgaagtcgtcgacgtcgtctacgcctttcagcgacacgaacacaccgcgcttccgcatcagctcggggatcttgcgcaggatgtcccgcctcgtcacgactccgatgggctcctcgagcttattgacgatcggcatgccccggataccgtgctccacaatcttctcacataggtcaaccacggtctcatcgggctcggctcgcacacaaggtgagctcatgatattcttcaccggatgaccgaaagcgggcactttctcgcccttgcggtccatcttcccgagcctggtgatcggcttgatgacctcacggatgatatccgtggtggtgacgattcctcggagtttgttcgcgtcgttgaccaccgggagtctgctgataccgtgatcgcgcattatggctcgggccttggcgatggtatcgttctcgtgaattgtgatcaccggagtgctcatcacctcccgagcgtcgatcttggttaactcgtccgactcgcgcgcgacgtcgatgatgtcgtactccgttacgagacccacaaactccccgtcctccaccacgggtaaggcgcggagacccgaatcgatcatctcggtgatagcttcgacgatgagcgtgtcgggggtgaccgtttccggcttcatcatcacggtttcgggtctcacgttcgagatgtccgccacatgagcgtccaccacgtcgtaatacgagatcatccccacaaccttaccatcgtctacgatgggtatttccttcacaccgtggcgctccaacttcgagaatatcttcgacaacggctcgccgggttccgcggtgatgacctcctcagcgggcgtcataatctcctcgacggggcgctcaaagatttccaacggatcgcccccatagatgtttgacggcacgacgatggttccgatcacggcaaaaaagaaatcggtaccggacccgcgccggcgtcgagatggcgagatgagggtgggtgacttgagtggtgagcccgaatacaagttggcgctagcggcagttcaccaagggctcgggatcctagccggatacctatgcgctacggggtactctatcgtgctcgtgatggcccttttgatcttgccgttcgccctcggtaaggtcctggagcgattgctggagcgagagcgtatcggcggcgccaagggctggttagcgtacggtctaggggcgtacctctcggcgtggatactagtttggacgtacttcattaaccggtaatcgggggtggtatcgatcggcaggagggtagcagtcgtggacagggagcggtgcaaaggaggatccaaatgcgactacgtctgccaacgtttctgccctggggtcaggacagggcgtgagaccatcacgatcgacgaggacaccaacaagcccgtgatctccgaggaactgtgctccggctgcggtatctgcgcccagaagtgtcccttcgatgcgatcaaagttgtacgcctccccgaggagctagaggaagaatgcgtacacaagtacgaggagggagggttccgactctacaggctccccgttcccaaacccgggaaggtcaccggcgtgatcggacgcaacgcgatcggtaagaccaccgccgctaagatactcacaggagagctcaaacccaacctaggggatcctgaagcggaccccgactgggacgaggtgatccgagcattttcgggcacggagctccaggaacacttccgacgtatcgcggacggtgatctccgacccgtcatgaagccgcagtacgtcgaggccctgcccaaggtcgttaagggccgggtgaaggacgtcctcgaggacgtagacgagctcggggttgtcgacgagctcatcgagcgcctcggactgaccgaggtgaccgaccgacggatctccgacctcagcggtggagagctgcagcgtgtcgctatcgccgcggcactctctcgagacgcggacttcctggttttcgacgaaccgtgtagctacctcgacgtcgaacaacgactctcgctggcccggtcactccgtgagatcgtcgaggatcgaggtattccgatgctcgtcatcgagcacgacttagccacactggactacgtcgccgacgtggtgcacgtcctctatggaaagcgtggtgcgtacggtgtggtgtccaagccgatgggtgtaggcaaggggatcaacgcgtacctgaagggttacttggaggccgagaacgtccgcttccgggacgaggaagtggtgctcccggagaaaccggcggaggccgaggcgggtgagcgagacaccctcgtggagtacggcgagctcgtcaaggaatacgacggcgacttcaggctcgaagtggagccgggcgaaattcgtgtcggggagatcatcggagccctcgggcctaacgccatcggtaagacgaccttcgttaagctcctggccggagtactcgagcctaccggaggaggagtcgatgtcgacgttaaggtctcgtacaagccgcagtacctggaggtggattcggatgaacccgtcgagcaagtgctacgaaggaccgccggttcggagtggggatcgagctggtaccggagcaacatcgtggagccactggacttagagtacctgttcgatagacccttgtgtgagctgagcggcggtgagctgcagcgcgtagccgtggcggccgccctatcccgggaagccgatctgtaccttctagacgagcctagcgcgtatttggacgttgaagagaggatcaacaccgcccgcgtcatcagacgggtgatcgaagcacgggatgctgccgccatcgtagtcgaccacgacttactcctgctagactacatcagtgacaggatgatggtgttcgaaggcgagccaggaaagcacggacgtgcgaatccgccggagagtaaacgggaagccatgaacaggtttctgtcgaacttaggcgtgacgttcaggcgggacccggagacacggaggccgagagccaacaagcccggcagtcaccgtgaccgtgaacagaagcgtcgtggtgagtacttctacgcgtaggggacctcccacggcactagccgacgaaaacgcgtcggtctcgagctccaccgattctcggacagcaacataccccgacaacgtcccggaggccctttatgttgaaatatggaaacataattgtatttttaggttcatacggtttatgcatgatccgtgcatggaagttgaatgatagtacgtaaatagtatggtaccaatgcatagattacatgagcgttatcgcatggtccgtgcaagtgtaacgtattatcgtcgaagaatcgtaatattatttacgtacaatttttcgacaatcatacacagaccgtaatatccaacatcgagttaacgcccgcgggaagttcaaaaactcgatttatttgcggaaaagacagttcggagcgtgggcggggagtcagagctccgtttcgaactcctcagtctccaaccgatcacccttgagcatgtacagcttcatccacacctctttaccgtcgatggtgccgtacatgaacgacggacccgggctaggacctccacccgacggtacgccggtaaggctccccgggtttacgatcagcacacctcggtgctccttgaactccggcctgtgggtgtgacccgtgaagataacgtcggccccctcttcctcggctatcgccgcgagctggtccgggtcgcccctcggatggaccccgctgccgtgatctaccgtcaccttgacttctccgatatcttcggtcaccctgggaggtagcgggagcccgaagtcgcagttccccaccaccatcagggctttttcaccgagtgacgctatccactctatggtgtcctcggtcgtatagtccccgggtgaaatcaccacgtccacgggagcgagctcctcgatctttcgcttcagagtgtgtggaacttcctgcgcacgctcgggaatgtgagcgtccccgagcaccagtaccgtgatcatcgctagccccctatccgcgtatcatcggagatcactcttcaacctgatcgggggccgggtcgagggagacgtacccttgggaagcacaggcgcggatgaggcgctccccttcgctttcatcgaagaacgggggcgcccaatcccgcgtcacccgacggcgttggacaccgtcctcgttcacggccacccggtaggcgagtatccctcgacgttgccaggccggggttcgtccgaggttgatcccgaactctcggtagagcagctcgtgcacatcgtgcgccttcattccacggagccgctcggcggcttccttgggtttcagtcctcgctcacgcagcgcccagtacgcataggagttcaggtgattccgccaggcctcgtcctgacgccacttgaagtagtccaccaggtcgtcgtccgtgagcaccacgcacctggagtcgaaggacaccgtctcgccggtcggatctatcccgtggcgctgtaaggcccggaagaagtacgtggaggcgcaggacgccgatacggacgtcaacttttcgacccgaccggagaaggggacgttgccccggggtatgagcgcgttaagctcgtcggagaacgtatagacgagtgtgatccccagacccgcgtctcgaatcattcggaccgccgtctcggccatagcttctgcgaaccgtcggtcgtagggcttcttgaggcctaaccggcgggtgagtttggtgaacgcccttccgtcgatccgcagaaccaggtgtgtgttggggggtaccctaaggtccgcgtatacctcgagatcacagggttccacgggcttcaagtgcccactcgaatcccctcggtcatccgctcgatcaaagccacggcggagtacgcggcgacggcgctcgtctttgggttatccgggagcgcttcgttcctcagctcgaaccggtacgtacctgcgctcgactcaacctcgatgacgtgcgtgttgactgagacctcggggtcgcagacgatccgaactgtgaccagtgaggggtcgcctacggccagcgacacggcggccgccacgttgatgttcttggggaacttgcggacggcatcccgcacggaaccttcgtagagtactgtccgctcggaaacgtccttgttcagggctttcggaggcttgatggtggtgagagtgacctctctcacccgacctcgcagcgctcgcagcacgtctagacctcctaccgcaccggacggaacgtgaaggcgatgtccggtgacttccgcgacctcgcgacatcgactcagcaggccctcctcaagcaccagcgctcccacgctcatcacgatcacatcgaacctcttcagcgcgtcaggtaagaggctagccgccgcttccacggaggcggcctcgagcagcacgtcggcttcggcgctcatggcgtcatctaggtcggtagaggtatcgcagtcggggaaccaccgctcgatgcgtttgagcttctccgggtgacgatcacagaccagaaccggttccaccttaccttcgagccgtccttcacggatctccctcaacaccgtcgttccgatgcctccagcgcctacgagcgctaaactcagcttcttcatagtcgacgataccctccttcaggtactcgaccagaccctccggaagcatcggctttccctcggaggggtagtcgcaatccaatcgcaccgtatgacccggtgcgacctcgatctcgggcctctccaccacttgtatctcctccaacggaactccacactcgagtaccgtgagagccactctaagggcgccgtcgatgctgaaatggtaaggtcctaaatgtcgaacctcggcgtcggggaaccgcggtgtaagctcctcccgagtacgatgtcgacgggggtagtcgccgaggatacctccgacgatcaccacgtcgggatcgtcctcgggagtcagaggatcctcggcgtccgggtcgaggactatcacacggtcgcctcgaagggggagcttggacgcggagtacggcagtgccggatacttggccttcgccagcacctcagggtccgcgttcgtgaccgtgaactcccacccgtgcttcctcgcggtccggtaggcctccatgtactcgaggtcgagccagggagaccaccggtcgagatgttccactatcgccacggacatcacgcgacacctcagatctccagatctgaaggtttagccggtgagctctcctgcttcttccttttcccttcctccccggaagacgccttctccggagattcgatgataattatgtccccgacggccttcaccagctccgcatcgacggtctccgtgcgcctacctcccccaccgggaagcggtaacagaccgccgccagagggttgctcagtgacgatcaccaagaaccggacgagatcgcccgtcctggggtcaaaagtcacgtcttcgacggtaccgacccgacggccgtcttcggtaaagacctccattccgagaagccgttggaacctcacgtacctcttcctgtattcctcctcgttgctactctcaccgttcgtcacgggggatcccccgtggaggtcgtggggattcatcacgggcacgacgcgggtgccgccctgatccgagacggggagattgtagcggcagccaatgaagagcggttctcccgtaaaaagttccaccgtgggtttccggagcgatcgctccagttcgtcctcgagcgtagtaatgacgtcgacgtcctcgcggtggccggactgtaccggaaacgcaaggatttggagcgagtacgggacatcgccgaagagctggaggtgcccgtatacctagtcgagcaccacgccgcacacgcggcctcggcttattatacctcagggtttaaccggtgcctgacgatcacggtcgacgcggccggtgacggactctccgccacggtttgggtctgcgagcgcggagagatgcaccgggtctcgacggagtcatactacgactccttaggcgatttctacgcgaacgtgaccgaactactgggattcgagccgatgaaggatgagggtaaggtcatgtgcctcgccgcctacgccgaaccggatctgagatccgtcgagtggatcagacgcgaagtcatcgacgtcgaggaagggaacatcgtcaaccgcctcggcgcgatctcgggagaggccgtacgccgcctcaaaaggtcgaagctcgctaaaatggggcgagaacgtgccgccgccgtggctcaagaggcgttggaggagttactgctggaatacttcgggcactacgtgaacgagtacggagagaaccgcatagcctacgcgggcggggtggccgcgaacgtcgtggccaacatgaggctgcgagaggagctcaatattgacctcttcgtgcacccgaacatgggtgacggcggtctcgcggtcggagcggcgctgtgggcgtgggcggaggaggagctcgcccgtgggcggagacccgaaccgcgacgtttggaggacgtgtacttcggacctgaatacgatagggaagaagtgcgtaaggcgctggaagagcatgacatgacggaccgggcggagtacgtggggaaagaccccgacgccatcgtccgcaagctgctggagggcaagaccgtagcattgttccacagccgtatggagtacggccccagggcgctcggagccaggagtattctcgccgacccgcgagatcggggcgtggtggataagctcaaccgtgatctgggtcgggacccgtttcagcccttcgcgccgacgatcctgtccgaggacgccccggagtacctccggaggccctgtgagtcaccgttcatgaccctagccttccgcgccacggatacgttccgcaggaaggctccggcggtggttcacgtcgacgggaccacacgtccacagaccctccgggacgagctgccgttctaccgagaggtgatcgagacgttccgagaggagaccgggttaggagccgtcctgaataccagcttcaatccccatggtgagcccatcgtgtgctcaccgagagacgcactcgaggcgttcgagcacggtgttgcggacgtcctgtggatcgaaggctacatgatcgagcgggggtgagctcgtgccgcggccgaaggtcctgtacaacgttgggatgacggcggacgggaaggtcgtgaccgccgccggagattccaggatctcgggcgaagaggatctcaaagaggtccacaggttgagagcagaacacgacgcggtggccgtggggatcaacacggtgcggaaggacgaccccatgctgaacgtgcggttggtggagggagaagaccccatccgagtcgtgttcgacaccgagtgctccattccgctcgactgtcgcctagttcgcaccgctcgggatatccccacggtcgtgctctgtgccgaggccgacccgggtcgcgtcgagaagctcgagaaaagaggtgtgaaggtggaggaagtcggtgcctgtgaggacggcgtcgatgtggagcgtgggctggagctgctctacgatatgggagtacgaaccttgctactcgaaggtgggccaacgctggcctggtccttcttgaagcgcggcctgatcgacgagttccgtgtggccgtggctcccgtgctcgtgggcgggtccgacgcgttgacgcccgtagagggtgaggggttcccgcgtgtcgatctcggagtgggcctggaattaaaacgggtggagcgagtggggcgcgacgtggtgctctggtacgaggtttccggatccgccgccgacctggcctccgaacacgaagaggctcgggggagatcgtcatgaagtgtccggagtgcgggaccgagatgcgatcggagctccgggacgatggggtggaactcctcaggtgtcccgagtgcggcaaggagatcaagcgcgtcccgtcgtaccgggagttcggtctgaagtgcccgaacttcttcgagatgacggtaccggagtgggacgaagaagtgctcgggaaggaggttgtggtggtcgtcaagtaccgttctccggacggttaccgccgccgcaagatccggggtaaggcggtgcggatcgacaaccgaggcaacctcgtgatccgtcgagaggacggtttcgaggtctcgttgtacccccaagtagtcgagaacatcaaagtactggagtgagtcggctcccgccggtccggtcatcggccgtaacggcctcccagatccccaccggagatcccatcctcatcccaccggagggcacatggtgcgccacaggtattaaacggatctcgagccgacgggcggccgagggttcgacgggggtgagccggtgcgagcggcggtcacaatgatagccttcgtggtactcatgagtccggtttgcgcggaggtccacatactgacgtgggccggcgaaggggccgactccacctgcgtcgctaggactaaggagatagtggattggtgggacacgtacagggcgatcggtcccgataccaccatcgtctggcattacacgacgagagtggaccgttggaggaccgtcctggagacggggaccgacccactcaccggagcccggatcagcgtggtgtacgtcccagggggctggcatcccgagcgttattgggacttcgactgggttcgagccctctaccacgcgcagatcgacctcggcatcggatacgtcggtatctgcgcgggtgcctacctgcacgcgggtaacaccacgtactccaccagcgggccgggacacgatgacgtgctgcaggacggggtcacggtaatcgacggcatgaacggacccaacaggatatgccgtgtactgatactacaggacaacccgctgaccccggaatggacgtggggcaacgtgttcacgtacaagtactggaacgggccggggttcgggccggaaccgggtctcgagttcaacagttcgtacaagtgctgggtgaagatcacgaacatcgaaggccgcgaagtgatgatcaagatctggccggtgggagagtacgtggacacgtgcaagggctgggcgatagtcgccggacagtacttcgtcaaagaaggcgacaagtgggtaccacgcggccggttcgtactcttcggaccgcatccggaactgacgtcgagaacgggagcccatgcgctgctggccaaggccatcctgtgggcggcgggagccaaagtaccgatggaaccccagccgtcgccggtcgtccaggtggtacccaagggaacgatcccgaaggccctggtagcggccgtcgtggcgacggcactgaccttcgtgctcccggaggacgtcaaggaggaactgttcacggcgtcggacccgatcacccaagggatattcgaaacgatttccaacgtaatccaggacaagctggggctcgaagtacctccggaggatctactgacggtgacggtggcgactgtagtagtctacgcccttgaagcgctaatcgagtggctgttcggaacggcgcccgccccggcctccgcataacctccctacgggcattttgttatgaatccgataacgataccgggcattggtagcggggccgggatttgaacccgggacctccgggttatgagcccggcgggatggacctggctaccccgccccgctgccggccatacgggcttacgaccgtgggattacatgaatttttcgggcctcgaaaaccccgataccacccgagcggggaggatgcgtatgggactgtacctgggggtcgagggcattgacggcgtcggcaagtcgtccgtggtgaacctagccgcggagttcctcgagatccacgggctcgaggtcaccaccgtgagggagccttccaccgacatcggacgtgaagccttggagtgggacgacccctacctccaagccctggccttcaccctcgaccgtatgctcacacttaaacgggtggacttcgaggcggccgacgtcgtcctgtccgaccgtacgttcctcagcacgctcgcctatcagtccgcactgggcgccgacatgcggtggctgctggaactccaacgcccggtccctaagcccgacgtcgtgtacatcatcgatcgagaaccgctggcggaggacgcgacgttcgataaggagttcctggagcgcgtgcggaaccgctaccgggaggcggcgcgactcatcgaggaagagttcgacgtcgaaataaaatggatcgaggcagaggatatggacaaggaggagatcgccgagctgatcgtagccgacgcacgccggagactggacgacccgctggggattcccgacgacctcctcgaggggtgacggacggtgagctaccgacgtggcgccgacttcgagcgtcaactggtacgctacctccgagagcacgggggtgaggccgtcagggtggccggatccgggggcgccgtcgacgtcgtgggttacgcaccggcgatgggacacgtggccgtcgagtgtaaggtccgccgcgatgacaggttgtacgtcgaaaaagaggagatcgagggtctgacgacattcgcggagcggttccgcgcggagccgttgatagcttggaagccaccccacgttcgaacgggtctcccgcttaacgccgtcctcttcccgcccgacctgatggaggagcgcgagagaacgtacgtaatcgacctggaaacggccctcgaggaagggatcgacgcctccaggctcgtcacccggcccttagatcactatcgaaggtgagcacccgttcctccaggaactccgagatctccggctctacacccaatctagcgcactccctctccacttcctcaacggacggcgcctcccacgggaacccgaggtatttgcccaccagtcgcaggaacagctccttgtggctccggtatccgagacgcttagccaccgcccgcttgatacccagttcccgcacgagcttgtccaacatcttggaggtcaacgacccgtactgagtagcccgcttccgcctctccaccacgaagtccgggagtccgagctccgccgcgacgcgcctcagggcgcgcttgcgcagattgtcctcgggccccgaaacgttctccctggggtcgatacccagacccgtcctcacaacgtccaggtccaggtatggaacccgcagctccaccgaatggtgcatgccggccttatcgtcccgctccaggttcacggcgtgtatcgcggccacgtccttccagagttcccacgagaaccgatcccagtcaccgtaatgtcgcaggtgccggtggtaaccaccgagcagctcgtccgccccctgacccgagagcatcacccggatcccgtcgtcggacatcgccccggcgcaggccaggatcgggatccccacctccaccttcatcgggttccaggtttcgacggcgtagaccgtggcgactacgtaccgctcgaactcatcctcgagggataccgagacgaacggccatcccatctcgtcgcacaaccgttcggcgacctccacgtcgtccgaaccctcgaaccccgcggcgtagcacttaacgtccacgtactcggacgccagtttcgccaccgtcgaactgtccaccccgcccgaaagtaccacacccacgcgctccgtctcctccacacgctcccgaacggatcgctgaaggacctctagcaggtctttccaggagcttctccccggtctcgacctggggacgtcgaccacgttcctcagctcgacacgaccgtcacggagcacgagcagcgctcccggtggtaccctacgtacgtcgcggaacccggccgcccacagggccttgcgctcggaggccacggcgagcccggcctccacgcagtagtacagcggacgcacgccgatggggtccctggccgcgaccaccgtgccgtccctgaaggccgctacgaacgcgtactcgccccggagtacccgaagtgccgccgccgcgtcacgtacggatcttacgacctcgaacaccgcccaggagtccgacggcgcgtcctcgacgaacctccggtagttgtagatctccccgttcacggccaccgcccgatcctcctcgacgatcggttggaccgctgaagcctcgccgcgcacccacagccggacgtggcctaggaccacctcaccctccgagggcggctcctcggagaactccacaccgtcgtccgagaccgaggcgaagccccgcccgtcgggcccccggtgttccatcgcggtgaccatcgcggcgatatcgtcgtcaccgaccgcacacgcgataccgcacacgttatcaccccgtaacccttattccacgtaaatccacggtggtagttcggcggggggtggactttggctcctatggtggtcttagcgttcgttttgatcctcctcgccctaactccactccagcctgttcaaggccaagaggtcgggacgctagcggaacacctcaggaaggcgtatggagaggactggccccactacgccccctgggtgcactcggagattaaagtagcagatgacgtcaaagcgtacaacctccgcgcggtggacctggggtacgatctagttcctggagtacctgcccatggcgtcctcgtggcgtacgcttcctcgagcaaggtagggctagcgttcgtcaacaggaccggagagttcttcaaactctgtgaagtacccctcgaagcccctcccaagtaccgtgaaggattggatctcgactacatggaggcggagggagacagcaccaaaaagaccgtgctgatagcctggggggctgacaacagactgtacgcgctgagggtgaaacttggggtctaccgaccgcacgagaacgcgaacttcccggcggttgccgaagtatcgaaccctatcgagatcgatttgccgccgggctatacggacgtcaagcgggtgagagtgctcgcgctgggtgataagttcgtcgtgttcttcaccgctcgacgagaggataagcccactgaggagtacggttacgacttgttctacgcactgatagaccccgacggaaccgtaaagttgggtccgaaggactttggattccaagatataatggtcttccaggtcaaacccctgaacgggccctctctgatagggctcgcctttatgggacgatggcgccaatacattgccggagtatggtgggttacaatgcgactagaaggtaactcgataaaagttattcaaacgaccctgatcagcgattcagattttgagattccctgtgtagaacgcgcattactcgacttcagtttttacccaataaacagtgacgaatactccgtactggtagtgtggaacgattgtaggtgcccaaaagtactttttgaacgaatcgcacagcttgtacctggagccgaatttagatacagaaaagataaaacatgggtcgtctatgggcagcgacttaaggtcgacaaaaatggttatacgagtaagttagggaagaattttcctgtcatgtatttaatgacagtaacacagaccacaacacagaccatttcaggaggagccgtcgagagttgggacatcacgttcggagaaattgactctgttaccgtatatacaactcatgggtcggaggagaaatatttcgttgtcgatgcctcaatcaaagtcttcgatgttgccatatcgaaatggttgaactacgcgcgcactggtgagttcgaggagaagaatacatatggcttcgatatcttatcagttccactaccggtaaatccagacagcccgggaatagtaggtactgaggtggatatggccgacgtggaagtttccctgacgaattttggaacctctcaaaccaaacagaagtgggtggcctatcctgtattcaataaaggaggttgcgaaataataccgaaagaccagccaagtccggagtgcttcatatacttatacggtacaattcagttcaacgaaacgcacgctactgaaactccaatagtggccgcagaccaaactgatgtaaaagcaagattacttccagacggagttattattgaaggattcattgagaacataaataagaagccatccctattcgtaatgccagtagtagcggttgtaggtcctgtaaaggacatatatttagaatacgacacaccggatgaattactacacaagtacatatatccgctggatccgttcaccgtactgaagttccggccaatccgtaccgaagatcatcccggcgctcaagttggacctgtaacgtatgatctaagatcgcaacagcccgccctgccgaccgtgtacctggaggtatcgtacaccacggatttcagtgatcgggtgcctgccggacctgcgctagtcgaaatactcggaccggcaccgccggaagaaccgaccccaggtaccccactatcgggctacgcgatcataggtgacccagaggtcatgagatccgaaaacgtcgagatagagagaatcgtgaacgaggagttggcagaaacccaagtacacgtgaagttcttacccccggccgtcgagacactcgaacgcatagcacaggtagtagcgtcgggaaccatcgatagggaagcggtacgagaggccgcgagtgacgccctggacgagctaagtaagtacctgaaacagtacaacctgctacaatccccgagcggtatccccgccgaagtggacagcgccctacaaacgttgggagaactccgtgatcgtgctcaagacatgaaggacgaggaactagtcatgaaactaaacaccgtcataaacaaccttaagcgactcgtggagggtacgtaccacgtcttcgttctctaccacccagtgggctcggttcaggagtacccgaaatccatcgaaaaccgtgaagacctgaagcgtctcgtcaacgagctcgcttacaccggggtgacctcgtggatccccatcgacgtggactgtgaggtcccgaacgtcgtgcctccggagacacgcacggaaacgagcggtaccgccctaatcacggaagtaccggtagtgcttccgcccacggagtcccattcatccgcaccgaaagccggaagccaggggcaaagagggacggaacccgtcaagccacgggggtcggccggaggtacctcctcgaaccctactccgttactgccgatagtcccctacaggcgtggactgtccagacccagactcaggagacgatcctgcacccgcagggctcgctgagtgcgttcggagagtttcctccacttcttgtccaacacgccccgcttaccctccaattccctcaggttcttgtgcagcacttttgtctggagcagctgggccgtgatccgaccggcgaccttgtgcgaaccgcgacggggcggtcgtccgtcgaactctcgcctcaggaaccacggacaccgtagcttgaccgcgtggagcttgtcgtcggtctccaccatcggcttcacgcagagcccctcacaccagttccgctcgagcctgtcgagttcccgctcgaggtctcccgggtccgggtcgacgaccacccgccatctggggggttccgtggacagacggcgacactcgcggagctgctctgttctcggtgctgtgatcttcacgctcccttcgagcatgtccagctcgtagaaacagaccctaggttcgagcttcccctcggctacggcggactcgaagtccggtttgacctggttctcacggaggaagcgctggataagctcgtgatcggggtccaactcgcagactcgggagaacagcggttcgggtcggcactcgtaccgtttgccttccaagtacacgagttccgccgtgagatccgaaggttcgccgtcgaacagtacctcggtttccagtctcccggcgagctcgtgcagtctgggcgactcctgggagaacaggtcgtagggaaggagctcgccctccaggatcgtgatccggtcgaactcgccgcggaggtcctcccaagggggctcgatgtcgagcccccggaggtactcgtcggcgtccacccaacccctggtgtgtgcgaggaggcggtccccttccaggtacacgcggacgttcgtcccgtcgagtttctcttcgaggaccagctcacggtccggggaaaaagcgcggaagaggcgtagcgtgggttcgggctcctcaggacgggcggcggccatggtccgcgtcgcggtgatccggaggccctcggggattttcggcggtgcttcctcccgcatcgtgacggttcccgggttcggattaccgacgctcctccagtgcgtctttcagtattttgatagcgcaatactccccgcacatcgagcacagctccttggcctgcggcgggcgttcctcccggtagtgtcgtggcttcttcgggtcgatggcgagctcgaactgacggtcccagtccaggttccaccgtgcttcggccatctcctcgttctctcggcgggcgtacttcatgcccctggccgtgtcggcggcgtgagccgcaatgcgtgtcgcgatcacgccgaggattacgtccttgacgtccgggagcgccaggtgctcggccggggtcacgtaacacaggaagtcggcaccgtggtacgcggcgatggccccgccgatggccgcggcgatatggtcgtaccccggagccacgtcggtcggtacgggaccgagcacgtagaacggagccccgtcacacacgcgcttctgcagtctcaccaccgccggtatctggtcgagcggcacgtggccgggtccctccaccatagcctgcacaccggcctcgcggcaccggtccacgagctccccctggacaacgagctcccggtgttgggcggcgtcgttggcgtcgagcacggatccgggacgcatcgcgtcgcctagggatagggtcacgtcgtgctcccgcgcgagctccaggatgtagtcgaagttctcgtacagggggttctcggcgtcgtgatggatcatccaggccgcaacgatggcaccgccgcgcgaaacgatcccgagcgctctacccctccggaggacgtcctcgagcgcgtccagcgtgaccgcgcagtgtacggtcatgaagtcaacaccgtcctccatgtgtcgctcgatggcccgcagcatgtcgtcctcatccatgtccacgacggcccgtccccgtctggtcatttccacggccgcttcgtacacgggcacggtccctacgggcacgtccacggccttcatgatccgtcgacggatctctctcaggtctccacccgtgctgagatccatcaccgtgtcggcaccgtgatcgaccgctgcacgggccttctccacttcgaggtcgggatcgcagacctccggggatgttccgacgttggcgttgattttcacgcggagcccttcacctatgccgacgggccggacctcgtcccgacggtccgcgtgggccgggacgaccacccgtccttcggccactcgtctcgcgagcttctccggtcggacgccttcctcctccgcgatcttccggaccgtatcgggtaccgtccgcctacactcttccatcagggtcacggcgtacctgcccctgcccgcgctgccatggtcttagccaagttcatgagttgtgagaacaacgcgttcatttcgaggaccaacggtcgcggtaggtagtgctcccggacgtacagtccgaaccaagcggctgataacgttacgaggacccagatcaggaaccacaccacggcgacggatgccgaatcacggttcctatgggcggctgcgatcgggaagtatacgaaaaacggcagtgccaggtacggatgtaaggctgttagggaacctacgatggccgacgcgccgacggcacggacggactcggacgggatgcgcccgaatatcctgacggcgtagtcgggtggttccacgtacgccacgaggtagggtccgaagcggaatgctatgtacgagcagtcgtagtcgacacgctcacggaccgttacagcgttttcggcggcgcgaccccttgagtcgcctatcccgatctttatcttgacgtcgtcttccgttagccgacccacgatcttgatcgcggccctcagcgcccggcttttggtggggaaccgggctattacgtcgtcccctcccctgcgatggtccagtacgaccccttcttcctcgttgatcacgtcgattaccctgctcattataccctccagataccgacgtccgcgctcgcggactagctcggaggacccaacgatatctaggtagaggatacggtcgggcgcggtgttggttcggcggggtgggggaagcgggtcaccaccccggtggatgatccactccgccccgatcttggagaacgcggcgaactcggagtcggcgtgacgttcggccttggcgaaccgttcggtggcagcggcctgggtgagaccgatagcggcgctaccatgcagccgcagtgggacttgaaccgcgaatcgtagtgcgtggaatttagagggggcttccacggtcgcctcgcctcctccgcactccagcacggtacattggcactcgtgggcgagcgactggaggtcgttctcgttcctgtatgtgcaatacacgtatctggtttcatccagcactatcttgctgacgagcgccacctccgggtcgtcgtacttgaattgttctatcttcgtcagtccgaacccttcgcgtcgtagctcctccgccacctcaccgagctcgttggagattacctggggagccggtagagggtatccctcgaagcgcgttagtagcatgtacatggagttgagcgtttccactatttcccgctcctcctcggtgatcgggtcgtacttggtaccgcaggcgacgatctccccatcgacccgcggggaggccgagagtttcacgaataggcgtgaggggtgaatcatttcactccacctcttcgggcgttttgacgcgtaccttgtagtctcctttctcgaccaacaggctttccttcaccaccacgtacgggaacttcagatagacggtgcgggtggctacggtgctggctatgaagcgggcgagacggatcatcgtcggcttcaggtcttcgcccactaaaacctccaccttgaagggaggtcgttccttcgcgacctccgaggagtgaagcgcgagcactccgaactcttcgggccccacacacaagtcgttccgaacgaggaccagtggtgtatggtcgagatcgagctcttcccgggcggtgacggcgatcgctccggctttctcccgtaactcccggtagttgcggggatcgacggcgatgaagcacacgtaacggtcttcctccgccactggctcgagctcctcctcggcgacaacggttttcacgacggggatcttgctgaggaacttgtccagtacagtgtcgacccccttgagtgagaactcgagacccgccattccacctatttccctgaccacttccctggccacactacggacgtcgagttcggcgtgcttcttcaggtcgtacacggggtaatcccttttggctaacgcgtcgaggacctggaggctgacgtcggcacctatacgcttcgcctcctcgtccgggatccacaccttatccttacccgcgtccgacctctcggccttggccacgttcgtcaccccggaacccgcgagtagggaggaggaccttgagggtcgttatgaagttcggcggtacctcggtaggtaccggagagtccattaggaaagttgcgaaaatcgtcacagacgcggcggaggagcacgaggtgatcgtggtagtttcagcgatgtctggggtcacggacgagctggtacgggcggccgaaagcgccccggactggacggaggaggatgttaaaaacttcgtagggaagctccgaaggaggcacggaaaagccgcttcggaagcgatttcgtccgacctcatccggcgggaggtgatgggttacgtcgactccttactcgaggaactcgagaaagtgctgttgggcctcagttacgtcggtgaggtgacccctcgttcgatggacctcatactctcgttcggggagcgaatgtccgcacccatcgtagcgggcgcactacgggaccgaggactcgaggcggagcatctcgagggaggagaggctggagtgatcacggacgatgggttcggtgaggccgagccgatactgcccgcttgccggcggaaggcgcagaagacgctgattcccatgatcgaatccggaaagatccccgtgatcacgggcttcatcgggcggactatcgacggcgaggtgacgacgctggggcgcggaggatccgactactccgccgccatcatcgggtgcatctcggaggcggacgaggtgcagatatggaccgacgtcgacggtgtgatgacggcgaacccgaacctcgtacctgatgcccgaacggtcccgaggctctcgtacgaggaggccatggaactggccagcttcggcgcggaggtactccatcctaagaccgtcattccggcaaggtcggaaaacatcccgattcgggttaagaacaccttcaaccccgagagcgagggtacgctgatcacttccgaatcggagccttccgagcaggtggtgaaggcggtcgcgtcgtcctcggacgtcggtatgatcgacatccgaggcaccacgatgattgggcgtcccggagtggcaggacgaatattctcgagactcggggacgagggaatcaacgtcataatgatatcccagtcggcctcggagtcgaacatctcgatagtcgtgagccgcccggaggttcgccgcgccgctcgtatcatcgagcgtgagttcgtcggcgagcgagtggtcgagagggtcacgacgtacgaggacgtagccgtggtggcggtggtaggggagggcatgcgagggactcccggagtcgcttccagggtgttcagagcggtcgcggacgccggggtaaacatcaaaaccatctcgcaaggggcgtctgaggtgaacatatcgttcgtagtagcggaggaggacgaggcggcggcggttaacgcggttcacagcgaattcgaactcggtgaggaggcatgatcagacggctggtcgagcggtatctcaggcacgtcaccaaaaagcggctgacacgcagacccaccacggcgctgatctacacgtgcctcctcgggatgaaagccatagctcgagcgttttccgaggaaaccatctcgtctatttcccccgaacccctctggaccgtggaatccgtatccctggtacggattgggacctatccgggagacgtcctctgttccgagctggtctcattcctcactcgcgagttcgaagaggaagaaagagtcgaagacgtgctaccggaggtggaagtcgaagcggagtttctggcccgggtgagacgtttcaacgacctcctgtacgaagacatcgagctcccgttcgagatcgaaggtaccggcgaagaggaacccgatctcgacctgcgtctgatcgaggtcctcctagcgctcgacgaaatcccgcaatccgagcagggacggtacgcaaagccgttcatactcacctgtttcgaaacgctctcagactacctcgatgtgctgggactacgatggtcggacgtcgacaccgtgcgccgtaaggtaaggatcaaaggacgcgtccatcgtatttcacgggcactcgcctacgagctccgaaggattccacgcgaaggtgaggaggtgtttccgataagctccgtggacgtgatgcgatgggaacgggccgtatcgaaggaggtggggcggaggctcaggttcctgtgagtcgtcgagcgctctcaaggattttccgggcaagttgttctcctatccctctcaccctcgtcagctccgggacagtggcttcggccagatcccggacggagtgataacccgcccggtataatctcatcgccaacgtcctcccgacgccttccacctcggtcagttcgagggcttccttcggaaccccgtattccagcctacggcttagaagcggagaacgccacgtgatccccgcggcgcgggccaacctggacataccccaagcgatccacgcggcgtcgtccttggccctatataggtcgcccgggtataggtcgtatttccgtaggatactcctgtccggggaccccgaaacccaatcgctcaacgcttccgcccaggccaacctgcgctcgagttcccagtcatcatagccgaactcttcgacggccagttccaggacctcgtccgcctctatcgagggcgaccctcccatgaacgcgtccagcgtgctcagctcgcgtgatttcgaggagataggggccggttggaagtctgggcagagcgtgatggacggcaacaccacgttctcctcggtacccacctcctccatgcatcgtaggaggaacttggcggagtcaggcgtcaggtagctttgcgatacggcgtgacccaccttcgtcgccgtgagttccccctccagctcctccaagaacccccaatctaccagcatcttcagcgaggataacaccgcgtcctccgggcggatgttcaccgaggacatgaacgtgttaagcgctacccgcatgacgtccgcgatctgacggcagaatcccgctgccacaagacccaggaggaaacgccgcaactggggcccgctcacccagatcctactttggacggggtccgcctcggagtgcacgtactcctcagccaactccttccagtttgaggtagtgagaacgaacacgagacccatatcgtcgtagcccggcctacccgccctacccgccatctgcttgaactcgttcttcgtgggcttgatctcgtttcccaaccgcatcccgaagtccttgatgatcacgtacctagccggcaggttcacacccgccgcgagcgtcggcgtcgataccacaaccttcaggaggccttcccggaacgcgtcctccactagagcgcgctgctcggcggtgagccccgcgtgatggaaagcgactccacgcatcacggcgtaagccaagatctcggtctcttcaccctcccccagctcactgacgcgctccgcgagtgtccgaagttccttcttctcgtcctccgacagcagtccggacaccgtccgagataggttcttggcttccgtcatcgcgcgcctcctggagtacaggaacactaacgcttgcccaccttcacggaggcactttcggatcagcttccggaccttagcgtctttctccgacgcggaggggacttccacgatcctatgctcgagtttgacgggtctccagtcgctgatcacgggagtggcgtcgagccagtccgccagctcctcggcgttacccaccgtggcggatagagcgagcagcgaaaccttttcccggaaggttctgacgagggctatcagtgcctcgtacgtggcgcctcggttccgatccccgactatatgcacctcgtccaagaccagcaagtccacctcttccactaagctcggtcgtgagcgcaggctggcgtcgagtttctccgccgttgtcaccgtgattccgggccgcaactctcggatggggcgtctgacgtcgcccgttgagatctcaatagtgggttctagccccttttcccggcagaactcgatgacgttcgtgagttcctcgtatttctccctcgccagagcccggaagggcacgacgtagactactctggtctccccatgggattcgatgagctcgtgtaatgcgcgcatctccgcgaggagcgtcttaccgctggccgttggggcggcgatcaagaggttctcatcgtcgaacagacccttctcgacggcctcgcgctgaggggggaagagctcccagatccccttacgatcgaggtactcccgcacgtgctcaggtagtttcaacttcgaacaccctcgtcggaccggcgcgtacattagggcggtcggcggctcacgtcgggggccctcgaccgttgaggaggctgaagatcgaggggcgagcttacatccatcccaccgccacggtcctcggcgaagtcgagttgggccaggacgccagtctgtggccgggcgccgtagtgcgcggtgacttggagcccgtgaggatcggccgtgaatccaatatccaggacaacgcggtggtccacgtctctaaagggtatccggtcgagatcggcgacagggtcagcgtgggtcacggagcggtcgtccacggtgcgacgatcgaggaggattgcctcatcgggatgaacgccacggtgatgaacggagccgtaatccggcgagggtcgatcatcggggccggagctgtcgtgacggaaggtaccgaggtgggtccctacgagatctgggtgggggtccccgccaagcggatcggaacgaccgacgaggaacgcgtcgacgagatccgcgagaacgccagacgctacctgaaactagcccgtgaggagcttcccgagtggcggggataactaccgcctagcgcctgatcgcgaggaacgcggcaccgaccgccggcgcgacctcggaacctttcccgaagatctcgtcgaacggttccacctcgacgccgatcctcttgcaggccatctcgatcaggaaatcgcccgcgccggctgccaccactgtgtccagcccgtgctcttgaagcttgagctcgatgtgcttcagtagctgtccgagcagcgcccgaaccgcggtcttcgctagatccatcacaccctcccaaccgagttcctccggatccgagcacaccgttcgggcgagcctgcgggcgcactcctctggggattttccgcgaccgtccggtgtctccggagtgtaatcctccgggtcgatttcaccgagcaatagcaacgcgtccgccacgattgagaagtattcgtacgagaccggtaccggctcaccgtcgatctcaacttctcggagcagaaaagatattggcgttctcagcgcccccaagtacgccaattctccgttcttcatcctttccaaatcggtacgtccctcggccgcgacctcaccgcggatgatgggaatcagatccagcgtggtagaccccagatccaccaggaggtaggaacccggtcggacgtgagctaagacctcggccgtcgccctccagttggccgacgcgacctcacgccaacgtctgagggcctcttccgggggcaccgtcgaaccatcggaggtcaccacgtagaccggggcgtgacacgccgaggtgacggtgcggacgatgtactcgactccttcccgtctcgtgttgaaggcatcagctaactcgcccgtcatggttaaaccgacgacatccggcttgaacttgtgaacaatcctcttgatagttttctttagccgttttttcttcttccacatcggaagatataccctatcagtccctaataccatcaccttaccatcctcatcataacgaactagagcagcgtcggtgtgtgctccgcccacatccaaccccaatgctttcacgacgttacccccgatacactcgcaacccatggaagtcctcaacgacctcgaacttctcgggcaccaatgcctcagccccacgcttcacgtatacgtactcacgacggtaccgcagcaccttcccggtcggtccctcgagaagcgatcgaactaccgcctcgggatgttccaaggccgcagcgactgtgggtgtggtcggacgtgggttcacttcgatcaggtacggctccccacctttcatcacgaggtccacaccgaacaggcctacgagtccggggatgcgttcgaccacttcctccgcaatatccctcgcgatacgggttaactctcggtggtccgaaggtgtcctcccgcccaggtataccagctccctaccggcgaaagccacgaactggtcgttgatccctaatacgtcgacggtctctccgtccgatacgcacaacaagctgtgatgggagcccggaattagttcccgggagagttcacctcgccctattcgcacaccctccgaacccgcgccgtccgcgggcttagataccatcacatcggcctcccgtgtcggaagttgaaaggatcgggcgtctctgagagcatcctccgtcttgcgcttgtcggctgccactctgatggccctaggggtaggccctatcacctcggtctcacgagagtactcccggaccttactctccagcaggccgtcggattcgggggctatcaccagcgtcagatcggcacactctaacgcctgtgtctcgtctcggaggacctcatccgcccagcgcacaccgacggaggggtgggcgacggtcagtgtttcataacctgatttcgcgaacgcccttagaagcgactcgagcatggcccgaccttcggctaggaactcctcatcccctgtcgccaccgcgtactcgtatatgtacactcgcattgcagcaccacccggggacctccgaatgacggatatagtgtacgatgtggaagggttccgagcttttctcccgaaagaaacacttcgatggatccgacacagggagctcgagcgtaaggtaggtgtagtggagaaattttcggaccgggtcggacctatcccggtggagattcgccgcagaaggtcccaatatggcgagttctatcacgccggaaaggggactactcggatccaagcccgcgtctccgccgcgatggagtgcgtggaacgcgccgccgcggagccccgcgaggagatcatcgagcggggtccggaaggtgacaagtggacaccggcatggtatcggacggaacctagggagtgggtcgagggcgtggatttgacgacccgcgaacccgtctacgtaccggcgaacgaggtgttccatccctggttaggtgacgctctgcccagtcataccaacggactttcggccggccgtctccgggaagaggccgtgattcaaggactgctagaggtcgtagagagggactcatggagcatcgtcgaatacttcaggatccacccacccgaattggaagtacacggtgagttggaggaactccgccgatcgttagagcgggaggtcggtcgagtagagctcaggctgctgccctcccgagtcgaaggcgtttacgtggtaggagccgtcaccgaggccgagcgcgtcgaggagatggtgatgggattcggcgcgagtcccgacccggagatggccgtcctccgagccttgctggaggtcgcccaagggctctcgatggcccgtcgtggcatcgaaagccccgtgagaaaggggctcggtgagttttcggccccggggaagctgaccccggaacgtctcaagagattgaaccgacactggttcgagcccgaagggaccgtagagatagatgacttggaccgtgtcattacgaccggttcgttggagaagttgacagaagaactcgtggagagagtcgcggaggctggcctcggtaaggtgatcgaggtggacttaacgctggaaaacttggacgttcccgtggtgagggtgcgagtgaccggcgcctcggagtacgtgatagacgaagcgagggtgggaaatatgccggagaagccgcccggagtgcctatgggatgaggaaaagaggcccgcggagccccgcgatgacgagtgtcaccctcgccgacctcgaaacgagctcagaacaggtcgtgtaagtggatctcgtactgcccgagcttaccaccgaagttacccgcactgatcttcaccacgccgggctgctggcacgcggcctcgatgccgactctcatcgcttccttgacggcctcctcattgaggccgttgatcacgatctcgtagacgcacttcacgccctcgggcagctcgttgtcctccaccgtgggacagtacgcgtcgttggtcgacgcgggcaggaagtcgtactgcttggagccgaccttcgacgcggacgcgacgattccgccggggaacggcgcgtaggccccttcgacccccttgatggcgtcgaccgccgcctccgccgcctgaagacccgccggctgactctccgccatgatgtagaagttaccgccggccacaccggtggtgattccgaacgagtcctctacgatgaactctccctccacgactggtatcttccacactttacggccgtccagctcgtcctcctcctggtacccatctccgaagaagctcagcttgtacccgacccggtcttcgtcctccttctccgcttctggcatcgcgtcgaacgcggacgcagtgggcgccgtcattacgcactgtccgatgcggtctaagagctgttccttgagctcatcctcgtcgttgtggccgatcattatggtgacgccgggtctcccgtcgggggtttcctccggcgggacgtagccgcagtcgataccggcctcagccgggcacatgattaccgaagtaccgaatcctgtagcctccttaacggcgatcatcgcccacttatgtgaagcggcggtgatcaagactcgtgccatcttcgcctcgaaagcctcggcaaaggtgtcctcgatctccacgccgttgatttccacccggaacaccccgcaggagccacccgacctggcccttaaattcgcaacgattcatcggaggtgttccaggacggcttccctcatgacctccaccggtgcctcttcccccgtccacagctcgaacgccagtgccccctggtacactaacatgccaacaccgctcaccggggtggctcccgccttctcggcctcctcgagcagccgcgtcctcggtgggttgtacacgaggtcgttcacgatcaagtcctcgtgcatttggtcagcggtaacgaggggtggttcgtcctcgttcgggtacataccgaccggcgtggcgtcaaccagcaggtcggcgtcccgaagctccctctcgatttcgtccccgtccagccctatggcgcgtgcctttacccccactttctccttcagctcctccgcgagcctctctgcccggtctaccgtacggttggcgatgacgatctcgtcggccccttccgtggcgagcttgaaggagacggcgcgggccgcgcctcctgcaccgaggatcacggacttggtacctcgaggatcgaagtaggtctcttcccgcagcgcccgcaggaacccctcgccgtcggtgttgaatccctcgattttaccccgtgagaacctgacggtgttcacggccccgatcagttcggcgtcgcgatctagctcatcgcacagctccatgaccgcttctttgtgaggtatcgtcacgttaaggccgacgatccccagatcggcggcacctcggacggcgccctcgagcctctccggtggcacgtcgaaggccaggtacacgtagttcagtccgagctccttgaacgcggcgttgtgcatggccggagacagggagtgctcgacgggatgtccgatgagtcccacgacgttggtttcagcgtcgaccgatacggacacgctcacggccgatcacccgcgccttgcgtaggttgaacagcttcgcccggagggttcccccggaggctttcagtatgcagacgttgccgacgttgagcggatcacgacacgtggcgcagatcgcgggacatgaggtggtacctacgttcactaccaacttcccctccagactcccgagataccgacagtgcgtgtggcctgtgatcacgacgtcggcatgtgtcgagcgggctatttcctccagtcggtcgggcatctcgtactcccgacacgtgtagttgtctaggatctgatcgcgttttggcatcggagattcccgggccacgggattgaccggcttctgcgggttcaggcccagttccgagcaaggttcgtgaccgtgcaagacgagcatccaagcgtccccgaagcggagtaagtgaggcccgcccagtgacggccccgagtgtcccggcgggcacccgcgtccgcgacggttatcgtagcggcgcgatagtacgtgcaccccggcgtcacgcagcgatttcacaagatctacggtgtcgtggttcccgggaacgaagtaagtcggaacttcggaggatagctcccgtaggtcccgcaaaagctccctcaactcgggatctgaggccctaggatctgcgaggtcgccatcgatgagaaacgcgtcgaaatcccgcgccagatcgagtgccgcttcccaggtttcccgatcgtgtccctggtactcgtcaccgacgtgtatatcggaggatatcagcagtcgatcaccgggtaagcgcgtcacatcgagcatcatttggaccacgctaaccctcccgaccgaggacctcggggttgaacctctcacgaatcagcagcatcggcgtccttcgatggtagaccaaatactcgcgccagggtatcttcggtacactcacatccaatatctcctcgtcttcaggcgacggtcgcgcctcctcaacgcggagtatctcacgccgcgtctccagcctcaactcttcgatcatctttccgagcggttttctcgattgaagcaccagtctacgcaagcgccctggaaggttgtcgggacgggcgagtgaagtggctaggatggcgggtcgaccgtcgaccttgatgacgactcgtcggacgtatacggtgtctccgtcggggacaccgaggagtctcgcctctcgaccctcaactttcagcttccgggtttcgaggggatcgatcgttacttcctcgaagaaccgctcgaggattctcgtcaccgacccgtccgtgtagagaagcacctccagcagcgggacctccatccgatgaacctccatctcacatttcgccgtactcctgcagtagctggagttcctcccagctgaccttctccccacgctcgagccgctccttgatctccttcagtcgctcttcgtccaccgcctgtttctccaggtccttgattcgaacctcgagcgcgcgctcttccgcgcgtttctccatgattttctgctctaaatcacggagctccgactgaagttcacggagctcgtcttccaacggtttcactttggccaactcctcgacgtacttgcggtggtaaccatccgccttctcccgcagcttatcggcgcgctcgtaacattcgatcatcttctgatggtacttgtcggcctcttcggcagtcttcacgaccttttcgtggtattcggaggccttttcgcggagctcgtccgcctgggagaacaactcgtcggccttcttggagtgctcgttagccttctcccacgccctcagctgctcgcggagctcttcgagacgctgggcgatctgctcctctcttctcggactgagcgggttggtctcgatctccctttcgagcctacgtatctcggctcggatctcccggatcggacgtcccactttggagcgcagtttcttggcggtctcgacgtgctcccgggccttctgagccaactccctggcacgctcgttcaactcgtcacgcttagccttatactgctggacctcctcgttcagctcgtccctacgtcgacgatgctcgtcggcgcgctctctgagctctcggacgcgttcgttcaactcgtcacgcttagcccggtacttctccgctcgctcccggatctcgtggatttgactccgaagctggtctattttacgctggatttcctgccgcttttcttcaaggtcatcgagttcctcacgggtcttaactagctgattttcgagctccttgattttctgcagcttgtcctcggagagcatcattcgacgggaacaccccagaagcgcagtacgacgggaacggcacgacgaaagtcgtcgaacgccatctcgatgatctcgtacagcggctttttagggcggaaccctaaaggcagaccgacacgctttaacattgatgcgtcgttcgcgccgtctccgaccgccacggtgtcctcaggacgggtgccgaaccggcggcatagctccatcagaacccttcccttcgcggaagagctcatgacggggccgtaaactctgcccgtgaggaaaccgttccgtacctcgagttcgttggccacgtacgcgtccaaccctagttctctacagaaatgggagaccacttcggtgaaccctccgctgatcaccgctacggcggctcccacggatcgtacggccgctacgaattcccggacgccggggttcaggcgcagctcggtcacgacctcgtcgagaacggaggcgggtgtaccggccagtaaccggacccgttcccggagggcctctccgaactcgagctcaccgcgcatcgcccgtctcgtgatctcttcgacttcatcgtcgactccggccgcctccgcgattagatcgatggtctccccatcgaccagcgttccatcgaagtctaacactaccagtcggcgagcctgggccattcgtgggcacccactcccgacccgaacccgtacttgacctcctggaactcacgccggagttcctcgacgtccttccggacctcggacggctccctgcgaccgagcacgacgtccgcgatcagctcggcgatgtactccatctcagaaagacccatgcccaaccgggtgagctcctgggtgcccagccggataccgctcggatcgtgggatttcgactcgtcgtcccagggtagcaggttcttgttgcacaggatgttggcactctccagtttttcggcgatgaccgctccccctccttgctcccgcacgtccacggcgatttgatgggactccgtgaagccccggtgctcacagagtacccggagcccctcggcgtacagagcctcggccagagccttagcgttccgaaccgtgtcacgcgcgtatcgctccccgtactccttgaactccgcgagcgctacggccagcgccgccacgtggtgcaggtggtggttgctcacgagccccggaaacactgcctcgtcgatgtcgtcggctagatcccgttgacagagcacgattccgccctgaggacccggaaacgtcttgtgagtgcttccggtgaccacgtgagcgccttctcggatagggtcctggaactgaccgccggcgatcagtccgagcacgtgggcggcgtcgtacaccacgtaacctccgacggcctccacggcttctacggcctcctccaccggatgtggaaacaggaacaggctagccccgagcatgaccaccgacggctcgacttcctcgatcttgcggaccataccgtcgacgtcgatggccatatcctcctcgtcgaacggtaggtactcgacgttgagccctctaacacccggagcgctgatatcgtggtggctgatgtgacccccgtgggagatccgaagccccaagatcgtgtcaccgggctcggtcaacgcgaagagagcggctaggttggccaccacgccggatgtgggctggacgttcgcgtgctcggcaccgaagagctctttggccagtcgtacacaggccagctcgacttcgtcgatgtactcacaaccctcgtaaagccgctcaccgggtttcccttcggcgtaccggtgcccgaaatccgtcacgagcatctcgcgcaccgcggggctggtcacgttctcgctggcgatcatggggaggcacttcttcagccactcgtgatgcttctccaccgcccgcacgacggaatgtacgtcctccaacccgaacaccccgagggagggttttgactttggtcgaggcgcgagcactggccgaggcagtgaccaaaggtgtgctcacgcacgtcgaggtgagcgtaaagccaggctccggcctggtgctggatgtggacgttcccagagcggatcgggtgaaagacatcgtcagatcactcgtaaccccgatcacgggcatgtatcaggtcagggtccggataaccaacgcgcgcgccgaaccggaagcggcgaataaaaagtgtctcgctacggggacgttcacggccctagggaaggcgctcatggacgcgttcttccccggtcggggtaccgaagccgtgaataaggctctcctcagggtgcctataacctccgaagaagcgtatcgcggcaagaggttcgatcgtgtgtacgatccccgcaagaagcgttggattccagctcggcccggtatgatgtgtagaaccaaagacgggatgatatgcgcggtcacggacgatcccgacggtatcgcgcccccggccgcggccgagaaggacgcgaagttggccacggtcctgtgtgatactctgttcgacatgctcctggctgaaaagccacccacggtgcgggggtaagcgggagtgaggcccgagtccgagggcgtccgccaagctgcgcgcctgatggcggtagccgcccgcacagctccgaaaacgaggggtatcgacgacatcgtcatcgagatcgtggaggacgaggacacgctggagaagatcgccgagcggatggaagaaattgccgaggaaaagggagccgacttcttcaagcgcgacgcggagtgcctcagaagatcggagtgcctggtgttaatcggtgtcaagtccagcggaccttgcggcctcaactgcggcatgtgcggagcctcctgtgacgatatcgaggagcgcagcgcggacgtcgagttcgcgggaccgatctgcgggttcaagctgatcgatctaggaatcgccttgggatcggcggcgaaggtcgccaacgatctagtggtcgacaaccgactgatgtacaccatcggcgtcgcagcacgctccttgggtgtagtcgacgcggacgtcgtgatcggaatcccgctatccgcaaccgggaagaatatatacttcgacagagagggctagccgggagggatcgcgcgatggcgcgcaatcccagacgtaagggtcgcgatggatggaaacagtcgaaatcgcgtggtaagccctcgttcgtgacctgtgagtgctgcggaggaaaagtaccacgacacaaggccatcccctggacgcaagggttcaggatcaccgacccggtggtccgtcaggcggtggacgaccgatacgttcacactttcagtcgcaaggtgtactactgccccaagtgcgccaggttcttggggattagaaagcccaaacgccgctgattctccccccacgggattccgcgcgccgcccacacgccacacgccctggttgtttcgggttctccctaaccagcttccaggttttttcgcataaacaggttttaaggagttgccgtacctcgtgcacgcccagtgtacagcctcccgcgggttaacagggggaagctgcgatcacccttcatgccgtgttgggtggtgggtcagtaggtcacgtggtagcggacgcactgagggatcgtggtgaagaggtggtaatcgtcgactgcaacgaggaccgtgcggaggtcctgagggagcaaggcttcgacgtgattatcggggacattacggagaaggaagtgttacttaaggcgggtatagaaagggccgtcatggtgtacgtcctcacccccgacgacgacgcgaacgcggaagctatcagactgattcgcgagatcaacgaggacacgtacgtcatcgcgcgggtcacggacgaggaacgcgttgaggagttcaaggagctcggagcggacgaggttctctccccgaatcagctgctggtcgagaagttgcttcacaacatcgacaacgtgaggaaccgccgaaaagtgcacgagctgttaacgaagctcgaagacgtggagaccctggctataatcccgcacaacaacccggatcccgactctatcgccagcgctgtagccctccaggagatagccagtatcgtcgacgttcaatccgacgtggtgtatggaggcgagatcggccatcaggagaacaaagccctcgtgaacctcctcgatatcgagatgaagcggatatcacgtgtcgacctcgatgagtacgatgccatcgccgtagtggacaccccggtcctaccgcgggagctggcggagtacgacggtatcgaggataggatcctggtggcggtcgaccatcacgattcgtcggacggcatgatggacatgaacggcacctctaagagcgctctagagctcgcggacttcgtggatcatagacctgaggtcggtgcggcttctacgatactcacccaatacctcaagatcctcgataggaacgtcgaccgaaggatagcgacggcgctactgtacggtatcagaaccgacacgctgaacttcacgaggaacgtgtcaccggaggacctcaaggcggccgcgtatctctacccgcgggccgatcacgaggcgctggctaagatcgagtctccggacatctctcccgagaccctcgacgtgctcggagaggccatccgcaacaggacggttatccggagctacttgttctcgaacgtggggttcgtcaagaacgaggacgccttacctcaagccgccgactacctgctcaacctcgaaggcgttcacacggtcatagtgttcggtgtggtcaacggcaaggtgaagatctccgcgcgaacggacgatatccgcctgaacataggcgagataatgaaagaagcgttcggtgacgtgggttccgcgggaggtcactcgaaggccgccgcggccgagatcccgttaggtatcttccaggacgtcgagagcgacatggtgctcgacctcgtcgagcaggcggtacgtaagcggatcttcaaggtgataggtatcgaagaggaggaggactgaactcactccacggttacgctcttggccaggttccgtggatagtccggatcgatgcctctggccacgctcatgtagtacgccagcaactgaagcggtaccgtgtaaacgatcggggagaacacctcgctgatactcggcactcggatgacgtgatcggagtgctcctccacggcctcgtccttctcatcggccacggtgatcacagtggcaccccgagctttcacctcctcgatgttcgcgagcatcttctcgtagacgccgcctggctgagctacggcgaccaccggcacgccttcctcgatcaacgccagcggaccgtgcttgagctcacccgccgggtacgcctccgcgtgctggtaggtgatctccttgagcttcagtgcgccctccatggcggtcgggtatcccggaccacggccgatgaagaaccagttgggacgttccttgtatcgaccacccatcaccgctatctcacgctcccgctcccagctgagtacctcctccaacatctccggaaccttgttcagctccgcgtggtactcctccgcctccttgttcgtgatctccccgaagtggcgggctagctccacggccagtgtgtacatcgccgcgagctgcgccgtgtaggtcttcgtggcggcgacggctttctcgaagccggcgtgggtgtacatgacgtgatcgacctcgcgggtgatcgtgctcccgacgacgttggtcagcgcgatcgtcgtagctccccgagcgttcgcttctcgtacagccgccagcgtatcggcggtctcacccgactgggagatggctagaacgagggtattctcgtcgacgagttcctttgtcacgtaccggaactcggaggctatcaccacgtccacggggaacttcgcgagcaactcggtggcatacttcgcgccgagtccagcgtgatacgaggtaccgcacgcgacgatgtacaacttggtgtaatcgccgccgacgagctcttccgccatctccatgaggttctcccgttcgatccgtagcgtgttcctgacggcttcgggttgctcgtggatctccttgagcatgaagtgtggataaccgcggcgttccagcgtgtgcggatcctcttcaactatctgcacttccttctcttccgtgacatcctcaagggtctccgcgtccagtattctgacctcatcacgcttcaccacgacgatctcgccgtcgtcgatagggatcacgcggttcgtctcgggtagtatcgccggtatatcggacgccaagaagttaccgtcgtctcccaaccctactaccaacgggctctcctttctagcggccaggattacgtcgggctcgcgggtacaaatggcggcgatggcgtacgacccctccagccggcgcacggcttcgacgaacgcctcgaagaacgacttcccttccttcatcccctgctcgatgagatgaggtacgacctcggtgtccgtctcggagtcgaaccggtgtcccttatcctccagctcctccctaagttgcatgaagttctcgatgattccgttgtgtacgaccgcgatctcgtcacggcagtccgtgtgcggatgcgcgttacggcggttagggtctccatgagtcgcccatcgggtgtgtccgattccaatcttaccgggaagctttctgaggctacgctgcagcttcgtcggctcgccgccttcggtaagcttcccggcatccttctcgaggtacaatcgaccctcgtggatcgtggcgactccggcggagtcgtagccgcggtactcgagcctaaccaacgagtcgactataatgggggccgcgtcacgctcccctgtgtatcccacgatcccgcacaaaccgttcacaccctttacgacgagaggtattccacaacgtcataaagcacgcgaacggcatccacgagctcctcgatcgggacgtgctccgaaggggagtgtgcgtagtcgatcgaaccgggtccgaagactaccacgtccttacctcctaggttacggatgtaaccggcgtccgtgctcgccggccaggtaataggttcgtccgggagcccgcgggcgctgagagcttcccgtagcgcgcgtaccactggctcgtcgcccgagagtacgaacggaggtgctcctgcccgaatctcggccgagaccccctccacctcgtggaagaatcgctcgaggtcctcgggagacagctgagtgttgagcctgacgtccaatacggcctccaggcactggggtgtcacgttagtcgccacccccctggagtggacgctcgtggggttggcggtagggactccaagtgcgtcctcaagatcttccagcatctcatggagatcatgcagtatcttgcagaacttcaaaatggggttctccgggttgtgtgagccggcgtgtttgggctctccttcaatacacaacctaacttccacacgggacttgtgcccgatcacgggacgtagttccgtcggttccccgttgatcacgtggttcgcttgaatttccccacgacgtaacacgtgacgaatgccggccgaatcggtctcttctcggactaccgcgattatctccaatggtccatcccatatctcggccagggtagcgtaaacggccagattggccttcgcatcgcaagctcctcggccgtacagcttaccgtcgacgatgcggggttcgaagggtttctccatctcgtcgggtgggacggtatcgagatgtgacgttagacatacctctggctctccacgtcgtccgatcacgttccccagacggtcgatttccacctctaggccggcacgctccaggtccgaagcgtatcgctccgaaagctcttcctcctcgccgctgacgctggggatagagatgtagtcgcacaggagctttaccacgcgctccctgacatccaacctgatcactctcccgaaatctctcgaattcgctcacggacgagctcgcttactcgtttaccgtccgcccgcccccgtaggacctccatcacctcacccatgatcttgcccatgactgccatacctcgctcccgaatcttatcctcgtacctacgaatcgcctcttcgaccacctcctcgatctcttcctcggacgccatcacgatgccgagctcttccgcaagctcctcgggatcggagtccggatcggccgccagggcacccagcagctcctcgatcccagacttagctatggcaccctcggcgtaaagcctcagcacttccttaacgtggtctatggtgaggttatccacggggtacccgtctttttcaagccgcgggatcgtgttcaccagcgtggccgccgctaccttgggttccaccccggtctcctccacaatctcctcgaactcgtccacgactccatgctcgaacatctgctccactaactcctccccgagaccgtactcctcggcgagcctctccttacgctcccaaggtttctccggaagctcttccgccagctcctttaccctgtcctcgtcgatcaccacgggcgggatgtccgtctcagggtacattcgagcggctcccgggcggggccgcatgtactccgtcgtcccgtccttccgagcgcggcgggtctcggcagggacgcctttcagcgccatgatggcacgatctttcaccgcttccatggcggacttaacgcgatcctccgggcccgctatcaagacgaacccgtcaccgtcttccgctccgaggcgctgcctgacggcctcaacttcctcctccgagataccgtacttggggagctcatcggagtggaacagccccgaaacccctcgtctcctcgcgtagtcggcgagttcggtaccgaaccttcgacccggacacagctcccagcctaagatcccctcgaacccgggcagaagcagagcgtacactacaccaccgcgctcgagctcccgacggatgacctcgctgtccgtgtcctcgaacacgtccgtgacatccatgggctcacagtcgatcaggtccgtctcactgacaccgcgttcacgaagctcgtcccggatcctgaggagattcgcctgtctcaacgcctcgtacttgaccaccttgggaatcaggttcaggtcctgaacacccttgatctcctgcacggcaccgccctctatcgagacgttcacgtcctgccttaccgtaccgattcccgacttcacaccgccgacggctttgatcgcctcaccgatcctctcagcggcctcacgggcctgttccggtgttctgatgtccggctccgtagagacctcgataagcggtatcccgagcctgtctaggcagtaatcaacctcgagatcctgatcacgtcccttcaccttgcgggcggcgtcttcctccagacacaccgtgctgatacggacggggccttcggacgtcggaacctcaccaccgaacccgacgagcattgtacgctggaagccggtggtgttcgaaccgtcgatcaccatctttcgcatcacgtgcacctcgtcgacgacggacccacccagaaggagggtgaccttaatcgcgacgtcaagggcttcagaacaaggctcgtgcgggggctcttcgtccagttcgactaggcacgagaaggacccgtccgccaggtagtagaacgttcggtcgcgcttgaactcctccaaggccgccggatcgaactcgcccatctcgctctggaccgggcggagcttacgtctgaccttgggctccttcggtacctcttccaccagctctggagtacagcgacagaacagctttctggaagtatcgagctgccggtggatctcaagtcccacccggaggccgatctcttcccagtctaagtcctcttctcgcacaggctcgggcaggggggtcaccccctcgcggtaccggttcgcttatcggacgccctacggacgcgggtacgtagtccacgacggcgaggccgtgctggaggttaccttaccgggagagggcacgccaccggcggagggattccgcacgctccactcccttaaacgtgacctggagcggtacttccgaggctaccccgtagacttcgatgacgtcccggtgaggataaacgtttccggaaaaccccgggaagtgctcgagctcgtccgtgagatcccgtacgggacggtggtcacctacggggatatcgcccaaaaggccaacacccatccccgggtggtaggagtctccctcgcccgaaacagggtcccgataatcgtggcatgtcaccgcgtcgtagccgccgacgggctcggtgggttcaggtgggggttggaatggaagaggaggctgttagagctggagggagcgttaccatcgaggaggtaggccagtggatagtgatcgtcgaccgtgaggagctcgagtacgacggctcgcagctccgcagggcgttcgctcacgagcggtacggaattaaagggcgggccgtagtggtgtttcgaggcccgatggacgtgaggacggaatacaccgctgatgctgaggacgtcggctcgcctatccggggcaacgacgtgctgcatttgctcgtggacgaccctacccgggccgatccgctggtagcaggactgcttcaaaggttgctggtagtcgtaacgaaggaagtcatcgagaaggaactatcgacggatctggaccgcgacggtgacgatctcctacacgacggtagaaagctcaccgtgtcggttttcaagccggcgggccccggttcgctcgcgcacctcgggatcaacgtgacgaccgaaggtgttcccgtccccgcctcctccctacgcgacctcggttaccgtggagatccactcgacctgggtcgacgcgttgccgtcgaattcgtccgcgagatcacggatgtggagttggacctcaccaagatcaggtggtgagggacttgaacgaagccgtcgtgattcgcatcgagacccccgagcgatcggagcgcgtgaaagtaccgtatcgtgaggggatgacgctactcgacgcgctacgatggatcaaggagcacgagataccggacctcgagttcgagttctcgtgccggaacgctcaatgtggcacctgcgccgtgctagtgaacgggaaagctcgactcgcctgcgagtaccggttggaacccggccaggaagtgaccgtggggccgttgagacacctgcccgtggttaaggacctggcggtcgattggtcggcggtcacgtcgaggctccggcctctttcccctaaatcccaccgagagtggttccgtcggatggaacccgagaagcagcggaaattgtacgagctcagatcttgcatcgagtgcctctgctgtgtcgccgagtgccccgtgatcaaggcgggatcggcgcggaacccgggtccgatcgtgctacggaaggtagcggaggaggccgaaaaatgggacgagtcccccgaaatagacgactccgtgtacgcctgcaccacgtgccatacctgcgccgaggtgtgtcctaaggacatagagatcccggcgaaggccgtcgagacggtacgggcgagactctacgaggaaggtaaaggcccactacccgagcacaaagagctaggagagagggccgtacgcacgggcaggtccgtcgagaagagggacaggtcgttcttagaggagtactccggcgagtacggggaaggagacgtcaaggccatgtttttcacgggatgtctcgtggactaccgactacccgataccgggaaggccctagtcaggctggccgaggagttagggatcagactgatcgtccctcgggagcaggtctgctgcggctcaccgctcctgaggaccgggcagcacgaccgcgccgagcgtctagctttcgagaacctggagacgttccgacgggtcgaccccgacgttatcgtcaccgtctgcgccggttgtggggccacgctgaagaacaattaccctgagctcctcggtgataggttcgagtgggatgtactcgacgtcacggagttactcgtagagataagggcacacgagcgggggttccggctcccggagcgtacaacggttacgtaccacgacccgtgtcacctgaagcgggggcaaggcgtcgaggacgagcccaggaagctcatccggtcgatcgagaacgtcgagttcgtcgagatggaggaaccggaccggtgttgcggggccggtgggggcgttcgatccggtctaccggagctcgcggagctgatgtccgacgtgaaggctcacatggtacgcgagaccggagccgaagtgctgaccacggtctgcccgttctgcgaatacaacctcagggaaggactggagcgcaacgacgtcgaggcacgagtggagaacttaacggtgctactctccaggggtctttaacccccaagccttcgggtacgtgcccggctccatcaggaccctcttggtgtccaccataataccccgatccgcgtgtagcatctccttccaagtggccttggccactcccagcgctaccgcctcccctttcagcgtgaagatggcgactagatcgccgggctggatccccttctccaccctaacgattcccggcgcagccaggttggctccgtggcagatggcgtcgacggccgtatccctgatctctattctcggtaggtgctcgagaccttcctccatcggtcgtacaacgtgtcgtaagggctcttcccatccctcctccttccagaactcgtacgcgtccttgacgtcgtggagcgtgaccgcgttctcctccgagaacggccctgtcctcgtcctccggagctccgccatgtgcgcaccgacacccaaggcctcaccgatgtcgtgacacagcttccgaatgtaggtaccagcctgacacccgaccctcatcagcacgtcgcgaccgtcgatctcgagaatatcgatgtagtagatcttcttaggacgtaccctcctcttgactgccgagcgtaacggtggccgctgaagtatcgtcccctcgaactccttcacaacgcgctcgagctcctcctcgtccacatcgccgtggagatgcataatcgtcacgtactccttacccgccggtagcagcgtctggattatcttcgtggctttctcgagggcgatcggaaggactcccgtgaccttagggtccagggtaccaccgtgacccgccttggacagcccgaagatctccttcacccaagccacaacctcgtgcgatgtgggtccggccggcttgtccaggttgatgacacccttcatgatgtattcctcgatagggcgctcctcgggaggacaaccgtaccgtgggtccgtctccacctcggccttcgtgatcatctcccgatcccggtcgaacggcagccgccggtccttgtcgccgctcatgcgtggccccctcaacgttcgtcgacgcctctggtggcgctctcgataataacctcttcaccagccccgtgaagttccgatcctcggtctccacagcgtgccgactaggatgaccgccgccagcagcgcgacgatgagggctacgagtatccagcgagggaccgaggtggtgacgggggactgcgccgaggtccgacgaagtatcgaggccctcgccgatctctcctgcgaaggcttacccttacccgccgagcttccgacactcacttcgacggtagcggccgacttcgcgccgacagttccccggagcaggacgcccgtaaccgataccgggacggcaccccgaccgggaccgctgagcgcagcctgactggccagaatcgccgcgatcgtggccgaaatcgcgaccgcttgactcgcggtagctcgcaccgccaaagttctgacagtcctggcggccatcggggcggtttctctcgtgaacgcgggagacgtgagctgccggaggatccgggcgacgagctccggattgttcatgtagttggcggcgaagaccgccatggcctcgcggaggttgggaaccagtccctcgtactgggagagcgcctccaagaggcgctgctgcactaccggattcccgcagactcccggacagcagcataggacgccccggaggagctcgggcacgatcacgtcccggacgagggctacgaactcccggctcttgaggacttcctcgctgatcagcttgtgctgcgcccggtcgtacgcgatcacgagcagagacaccgccagcgagaacagaccctccggggagtatcgcgccagccactcccggttctccacgagcgtactcgccgtccgacggaaaatcccctcccagccgaggagtcccaatgcgagcgtggaccagccgcggatgaggtaaccaaggcgtttcaggagttccacagcacccgagtacccgtggaaccggagcccgcggacgtaaaccgggttgaagaccgtacgcatcagatcgtaccatgcgtaggtgtcgaagggcatgagtagggagtaccggaaggcggccgtctcattcccggtgagtgcggcgagcgtacgggtggtcacggtggagaacagcgaggtcatgttcgaagccaggagcgccgccaggtagctgcccgcactgagctgagaggcgagatcacgcaaccagggggctaggttcgggttcgccgcggccatcagttggatctcctccgcgagcctgcgcgccatctgcgagtaatcaccgcctacgtaagagccgagggccgcgttcctgaggttcaggaccaacgcgtcgatcatcgtctcctgctcgggtagcagcccgttgaccgcgctcacggccagcctcagaccaccctcgaacgcgtagatacagtcgtcatagaagaacgtggccttctcgtcggacgaaaccatcgtgtgaagcgtgcggtcgggcgccgcgaggttcagtgcgaggaggagcgggaagctggctccccagtgcttcggcccgtagacgtagctgagaccggatatccagctcagcgccaggttcaaccgatcctccagcaggaactctccggactcgatcgtcttgccgatcacgttcgtgtagtcaccgggcgcctgacagaacacgttgagggcagccagtaacgggagatcctcgtccggaacctcccggacctgctcgatccagcccgtaatgatcccaccgttcggagaacctccagaaccggcatccggcgcggaggttatgttcgactcccgacaggtcaacagcgccaggtagacggcggcccagtccaggaacggatagttctcagccggtggcacgagaacggcgagggaggccgcggtgttgacgacggattcgaagtcgtatccgtgttctgcgcagaactcccccaccaggtcgtagagccgcctcagcccctcctcgagctcgcgagccagctcctcgtccggggtcgtgagcgcccgccacagcgccgcccggtacacgtgcagcacggtctcgtggatcggattcttccactcaccctgggatagccgctccacggtctcgcgcagccaccggcgaacccagtacaccgggtattcatcgatcccgcggatctctaggactttgtccacgtcgctgacgatcagggagctgtgactcaatagtcgggccaggtagggttcggcggccagaatcgccgccactcggcccaagaacagttccgtcaggatgttgtgcgcgaacacgtctcggaagcacgaggtacctgtgacgatcacgtcggtgagtcgacgtgggacctcccgaagcaccaggctggccgagatcaccggctcgtctcccacgagcgttaccgtgccgatcacggtgactgtctctccctcctccggcacgcgtccctcgtctatccgcacccggacttccgtacacccgtccgttaggacgatgtaccgcccttccacacgttcgactctaccgcggatcggaagcctgccgaacgcccgtccgacggccgagagttgcgtgggcgtgagtacttcgtcctcgatcctcttcgcctcttcctcagagaggaccctggcattaacgacctccacgcgaccgcccgtggacaccagcgtgcccagtaccatgacttcatcgtccaagtggagcggtatcggcagcacgttgaccggacaccgcacctcgatgcgttgaccgcccatcggaggctcgagcaccaggcgaacggcacccgatccgagcgactccatccggacgatgcggcccacgactagaatctggccgaggcgtcgggtgtaggatacgccgctggggttcatacagagggatggatcgacgcccgtcacgacccagtccgcgttacggtgcgggagcacacccaacaggagcatctggaccgcgatcggtagccccctggtgttgatgttgtccgtcgcccagtcgaaggccaccaccttcctagtgaccgtacgtagcgggatcgcgaccgtgtaggccacgttgatcgagatccagtccggccacttccggggatcgaacatgcacgcgttccggcccgtgggtaatgcgtcgatctgtttgaaggggctcgagttgaaacccggcggcacgtagccaccgctcagcgcgttgaggaagttcgtacgttcgagccgcgcgctctcgaagagcagttcaacgatccgggccgcctcgcggtgtaggtcatcggcgtcccgcgtctcgggtcgctcgatcacttcacgacacacgtccagggccctggagtagtccagtgcccccatcacctcgttcaggagtaccttcgccgcgaagctagccacggtgccgacgggatcctctccgatcggcggcatcccgaacacgtggaggccgatcgggaccacctcatgctcctccaggtcgtgcagcaggaagtacagcttggcgcagttctcgtcgaatttccgctcgaacgcctccagcgagctcaggttcagcagctcgtacgctcgcgtcttctttaccagatccagaatcgccggtttcagggagctcaggtgggaggactggtacctctccagcagctctaggagttgacccatgtcgccggtgagctcctccttgaccagggactgaggtaggtagttcactatcaccgcccagccgcggcgcttcgccaccagcgcctccgacgggtccgcgacgtagtacgggtagacctggggcacgttttggatacatatctgtgggaagtcccaccaggacatgaacagaggcttgtacggcagccactcgtacgtcccgtgtttacccgtgttcacaatcacgtgcgcccggaacacccgagtgaagtagtagtaacaggccagatagtagtgacagggtggcagcacggtggagtggtacgcgacgctgatcccgacgtagtagcctcgggcgggctggggcgcgacgatgacgtttccgaagtcgatcccccgtatcacgaagtacttctttccgtcgatctcgacgagataccgcgagcgctcgggcgggccccaacccgtgaaccagccgtagaaggcctcaactcggccccacttggcgtggagggaccgacacagctcgagagcctgattcacctccttcggatccgtcagggcaccgatgacagcgtccaccagtgactccacgtcacgttggaactgctccttcgtctcctcgggaacgtccaggtattgcagatgacccgccacgtaggatacgagtgacttcagtccgttgacgatggcctgcaacttcagcgggtcggtgatcggaccgtgcttttggatctgaagcaacaccgcctccaggtacccgaagatgcctttctccatgcacaaccgagcctcctcgggcagcgaccggtaccatttcaggtactcgtcgagcggcaacaggtgcaggtaccggatctcctgctcccgctccacgaaccgaccgtgctcataggccagcagccggagaacgagcctgtgaccttccacgttaacgcgcctcaggatgtacgcaccgacgttggaaccctcctccaccatgagtcgtccgagggcgtcggcgaggggcctgatgagccgataggccttgtagtagaggtcgagggcctccttccacctgccctcctgggcgagctcttccgcccgttcttccagctccgcgatccgcagcagcatctcctcgatcgataacccgcgtgcctcggccgggatctcgtccgcgaactccagcagcttttccttcagttcctcgggaatttcgacgcggtagctcgccttcatcagccatgcgagaaagttcacgatcgacgcgggtacgtccaacgatgaggccgtaccgacgccctccttacccggctccgccgcccagtacaggattacgacacgcttctcccggttcggggtattgcgtagctcgatccaggccaggatcctgtcggcggctatgcggatcatctcggggacgggtgtatccgagcaccacacgcggtccagtagcgcctcgggaccgtccttacgccactcacggaccgagatcgggatcccctcgatggcacccaagttctccgggatcacgatatggtaaagggcgaaccagtccagaccgctcggagtacgccagcacgtctgccactcgctcatcgtccagggcagactcacgagcttgatcacgggtaggttcagctccttcagcagctcgacttccggcgagtcgggggaacgcatcttgaagaaccccgggagaagcgcgatcgtctgcacgttgtactcggatacgatccgcttcagagccagtagtacgtcctcaaggcatccgtcgaggatgtcgtagtgaaggcccaagaccatcgggttcagaccgcgctccctcagcgccttacacagctcgcggatgggggccgtccaaccgctctccatcctcgtagtgtcaacgattacaagtaccgtcggtccctcccggcggggttccttactcagaacctcctcgatgatatcagggaggtgtttccggaggagctctacgaaccaggcggggtaacgggtgttaccgaggatgacgcctccatcgccgtaccgctcgatcagagtcatgacttctcccggattggggtcggacgggcggattacctcgtcgcgctcgaagtcgtagccttcgacccatccgtcgaagggatggtagggaccggggtgcctctcgaggaaataggagaacagcgagcggaagttccgaacggaacgcgactgtacgtacagggagagtggaatctccagcccgtaccaattgaccttcacggagtccaaactcttcacttcggacggtcccgggagcacgttgtcgaactcgaacacgcgtttctcggaggacgattccgagaacaactcgttgaggacgttcccgaacaccgtgttgctcgtcgtgtggatcaacagcagggtgtcggcggactcgaccgcctccctcacgtgttcctcgggcacgaaccctttggaaaccgtgtcctctacgatgacagttacgggcagcccggaagcggccttcgcggcgggcatacccgtggaccagtaccccgtgatgatgaccaacttaccggcgtgaacgggtgacacggcgatcaagagcacgaacgcgatgacaagtgtcagcctggaactcatcagccacccccctcgggaagataccggacggacttctttagggggaattaagatggatgaaaaaggaagcgggattacgggcgtcgccgcagcgccagcgccagcacgctcagtgccgccaccgccggcgacactgcaggcgccttcttcttggcctttatcacgatcgtcgtggacttaacgccatacttgggatctctgtactcgatcttgagccgatgctctcctcgcttctcgggcgtgtaggtgatggtcgccttgccgtcggaaacgtcggctacgccgatgatcctgtcaccttcgtacacccgcacttcgcccgatgaagccggctgaccgtcgattgtcacctcgatctggatcgttaccggagtaccaacccgcgtctcccgtggaacttcgacttttagctcgacagtgtgtccgaatatctcagacctcacactctcgggtagcccctccacggccgccagtgccgccactacgtgagccgtggcgaaggcgcactggttggcctcacggccctcgaagaaccggctcatgtagaggtagtagtagctctgtggcgtcggcacgtagaagtagtacttgagtcctttctccttggcttccttgtactggctgaccagcgcattaacaacgttcttcatcaactgaatcgccatgtcgtcctcgtagccgagctcgaccgccgtacacaatccgagcaaagccgcacacgtgctcgcgaagtcaggtgatcccttgatgtactcgttgtacgggaagtaccccggcttgtcctcgagctgcattccgtacagccagcacacgtaccgcctcagtgcatcgtggagcaagtccttcgccttgtcgctcaggtacccagccttctcggcctcgcggatcgcccatagcgcgtagaaggcgtacttgactggatagtagtaagacttccagtacagaccctgctccaccgcctgcttctccaggaaacacgggttaccgttgccctcgtagaaccgctccaccaagaagttgacagcgtacttgatgatgtcagccaccttgtacgtcgatcctccgacgtccacatcgtcgtctccacttatgagccccgttttgacggcgtatatcagcgtcaacacggcaccagcggtatcgtagacggcgctgtagtcgacccaagtgtcgtccttcagcctctgtcggacccagtaagctatctcgttcttcgagtcaactatcagcacatcctttttgtcctgcttcgagctgcagtatacttctggaaccaggattccattcttgatcacgtacacagcgtcatccttgaccgagttccatagatcgtcgtcgacgagtcctagctcacgaccgactaacagtgggatcagctggtacaggcagacaccaccaatcgatcctgtacgtatgtacccactttcttcgagcgttgtccggatgtccttgagcgaatactggtaataatacccacgtggactactgaccgttagtacccacttaatagctcgcttcacggcatttttgaactgttcatctgtcactccttcctccacagctaacactagcatagggacagtgaacttagtatctgagtaccccggttcgcctccgaacccaacgtatccgtacttgtcgttcttcttaacgtaaattacgcacttactgttgtcaataagagccactatcttatctcctagtttgaccgtctccagcccgtagtctgaggggaagtagttgtactttttgacgtaaattacccggcagtctcccttgtacgtggtcggccatgtgccgacgtcgacatcctctaccgtgaagtccctggacgccacgccctcgtcttgcagttggccgtcctgttcggtcgcgaagtggacctcgtactgcttaccgttgtaggtgccacccgggtctcgcagggtgtaggtcttgccgacgtcctgctcggtgaactgattctccaccagccacactacgctgtccttcaagcactggtcggcgtcttcgagcgtggccgcgctgacgggtcctatcgccgttacgcagcataggatcacgagcaactgtctcacttaagtcatccccaacacgccggcttcgggacgtaattaatacttctttcggtcacgatgttaccaagaggctgcgggttccgcccgaacactaaacgttctataatccgtaacgattctaggaggggcggagggaggttcagtccccgtggatctcctcgagtagttcctctactatcttctccctgacctcctcaccggtgacgcgtcggaggatagctcctagcgtctcgtcatcgtccaccgggatgaagtacgccgtcttacggccgagacgcttcgacttcaacagtccctcctgcctaaccttatagagtgcgctcctgatgctgttggctttaacgttgtatcctagctctttgagcaccctaacgatctcatcgacgttaatccattgacccttaaggcttgccagtagcaccactgccaaggccgctcctaggttcgttagctcgccttcacgaagccttctcttaatctcttcgacatccttttggaactcttccgggacctcggacaactccgatcacccctctacgtctaatttcctgcactggcgggattcgggcggttaataaataaatcgccgtgcggttaccggactgacttacatgtggaccgatgacgaggtaatccccggccgacggccggtgtgatgacggagagccggcggaggtctttatattaatcccaagtagttaagtacggcaagggtggtgtgaacggcctcctcagttctcactacctgcaccccttgatttggcacgaagttaatcaccggatactcgtctcgaacccccggatctacgtccaggacactcacctcgctagacccgaataccaggcacttcaccggactcttaaactcgacttctcgaacgtcttcaccgtatcttgaagtcacaatgataccctccttaaactcccttaacacctcattaagctcatttacaatcctcactcgatacccccagtactcctcgggctcggccggttccacctccagcgggtcctcggagacgatccgcacagtcacccgttcgtgtggtttaaagcgccatctggtgcgcgcgaggcggtcggcacctacgtctacgagcgctccgttccgacttctcctaacgacgtaaccctcccgtacctcaccttccttcggcgagtggaccttatggtggggagccctcaacggcggcatgactccggcgtacctgaggtcacggtccagtctgaacaccctcttcctaaggtactggggacactcctgatactctaagagcttccgtagccgttccgcgttcctacgggttccgacgccgtcaccgtataggtaaacctcctccactcggtatatggccagggcgcgcgccagggtccccacccgataagcgtagatcttggggtcggtctcctcagagaagagactccacgggaacgcgaccgccaccacgacgtaacgcccccttcgggggagatcgagttgcgggtggcgtcgggcctcgaaccgcaggaagggtacgagataggagtggtcgtggacgcgctgcgggccagctcgacgatagtcacggccttagccctggaagctgaggcgatcgtaccactctcctccccggaagagctcaagcgggtggacggacccacgatcggggagcaacacggcaagaagatcgacttcgcggactacgggaactcgccgaccgacctgctccgccacgcggaggagatcgagggagagaccttgtacatggtcaccactaacgggaccgacaccattttacgggccgcggaggttcacgaggaggtgctgatcggtagtctgctgaacgcctcggccgtggcctcgaaactctccggtgacacctgcttcgtggaagcaggtcaccgggggatgctcgctgtcgaggacacttacacggcgggctacatcgcgcgcctcgcgggcggagaacccgccgacggtaggactcgagcagccatggagatggcccgcggtcttccggcggaggaggtgttcaaaggctcgaggactggtcacgtgctcgaacaacgcgggaggctcgaggacgtcgagttctgcgctcgtgtggacgagttcgaggtcgtaccggtctacgaggacggtatggtggtgcctcaatagttgctgatggatcgattcgagatgttcggctcggagctctacgtacttcggactgcacacgccggggtggacggcgaccgggtgcgacgtaaaattctggagttggatcccgaagccgtgctggtggagttatgcgaaggtaggctgctctcgttcctcgccgaacttcgcggtgagcgggcaggatcacggaccggtggaatcacggggaggttagtcgccgtagccgagcgcatcgtgggtcgcgtcgtcggaggagagttgggcgaggacgtcaaaggggccatcgaagcggcactggagctggaagccgagatagtccccgttgacatggacatcagctgggtcttccgaaggatgaagatgaaagcctcgagatgggaactgctgaagttccaattctccgtggcgatcgacgtcctacgatcgttactccgaccaggtcaaaccagggatgtcgtgctatcctccgttgcggacgaagaggccgctcgagagatggtccaggggctcagacgtgcttttcccaggatagccgaggtattaatcgacgagcgcaatcgcgtcatcgcggagaacacgatcgagttcctccacagccgtgaggacgtgaccaaagccgttctcgtgataggtgcagcccactacggagtgctcgacattcttcgggacgcggagctggagagcgcgtcgcgtcacgatgatgaggatacggcgagcggagagggtgaagaggagaccgcgggctgagctggccggccggaagattgaaagattcttgaataattcaaatttctttatagggcaacaacggatgaggagggcaccacgatgcgcgtgctgttcctgggctaccgatacgggagtagggccgcggaaaacgtagggtcgaggtcggacttcgacgttgagttcctcaaggtgaaagaacccccggagaacgttatcctggatgaagagtacgcgaggaccctcttgccaccgtcctactccgggttcgatctcgtcatttcgtacctccagcacccggacctacaactcgcgctggccgaagtttgtgattcccctatactgtacggtatcacccctgacccggcggttcgagagaagatagagcgcagtcacgacgccgtcgctttccccgagaccactatgtgttccctgttgcctgataccggtatcccagaggtcgaccgattcgccgagaggttcgggagaccgaaactggaggtgtcggtgtccggaggaaagatccggactgtacgggtcgtccgaggcgctccgtgcggtgccacttgggtagccgccgagcgtgtggaagggatgtcggtggacgaagaggccgtgaacgccttcgctctggcggcctgtcatcactgcgtcgcaccacgcttcggtaaattcgaatcgaaggacgtcacggcgtacctgcacggagtcgccttggccgaagcactcgggatcgaactcgatgtggacctagaggggttcgagctccccatttaaccgctgttgtttgttgtttaaagttaaagtttagagaagcttgatgcccaacccctgtaggatgaacttcaacgatatgtacaggaacaccactccgaatatacccttgatcgtccacggcttgatcttctgagtagttttcgcgcctagcttcaccccggcgatggtgcctagacccagcagcgtacctcctaccaagtccgtgaggccctgggccatcttgtacgccgctgagaccgtcgccatgggaatcatgctgatcatggacgttcccacagcgaggtggaccggtgcgtccagtaggtagatgaacgacggcaccagggcgtagcctccacccagtcccaggatccccgtgaggatcccgatgccgaaccctatggcggccttgctggacggcttacctggaatctcgtcggcttcggaccccgggatctttttgatccactcgtaaatcatccgaaccgcggcgtacaggaaagccgccccgaggatcacctgcagtgctccggtatgcttcattatgagggcgaagatcacggagcccagcagtgcaccgattgcgccggcggccagcacgatagccgacgtttcgtagtcgatgtttccgagtttcgcgtgagacatcgtaccgaacgtcgccgtccacaccaccgcgaagaccgtcgtagcgatggcttccggaatagggtacttcagcaagaacacgagcatgggtagcatcagcacacatccgccggtgcctatgataccgcccaggtaacccgctatgaatcccgttcccagcaactcgagtaccgcgagtgccgtcagcccgggcaaacgcgttgccctgctctcctctaatttcaaaagttttttaatgtttcgagattagttgaataaagggatgccatcgtgcctcggaagatcttggtgccgttcgacgggtccgaacccgccgagctggccttgaagtgggcgcttctggacgcgcacgaccacggatttccgatcaaagtgatgtacgtggtcgaccgctccttggacctgctcacgggcttcgcccccagggagaccgtgctgaaggagctgaaggagagaggggagaagattctggaggaagctgagcaaatagccggtgaactaggtgtcgacgtgaagattgagaagaaggtctgtgtaggcatcccgtggcgtgaaatcgtgagggaagcggaagatgacgaggagatcaacctaatcgtgatggggtctcacggacgaaccggtccagaacacgcgatcctcggaagcgtcgcggagaacgtgatcagacacagtcccgtcaacgtcttagtggtgaagcgtgagaagagggtcgaggatagcgttgaggagtcttcccgccgctagaccaagcgcaggccgctgagcaccatcttagcccctacgagggctaataccactgaaaacgcccgcttgactctctcaccgccgatcttgttggagagctccgcccccacgtatgacgatattaacatgccggtaactactgccagggcagcccagaagttcacgtacccttccatccagtactgagcggcccccgccagcgcgctgacggggacgatcacggaggacgtgcctatggcgagcatggtcgggaagttcaggactgatgccatcaccgggacgaaaagcacgccgccccctgagccggtgaaaccactgaaggcccctacgccgaaacccgtgagcgatgctaccgcgatgttatcgcggatctcgttcccctcctcggtttccccgtcgaacgccatcctgagggccatcgcggagcatgcaactcccagcgcgactttgagcacgtgctcgggagttaggcatgctaaatagctccccacctgtgctcccacgatcgcacttaatccgaagatcggtgccgcgtcgacgtgtacgttgccctcttgaaggtgcctgtaggcgccggtaaacccgccgagacttatggccaatagcgtcgtgcccagggccaggtgcatgggcattccggtggagttcaggagtggtactagtaggaagcctcccccgacaccgaacattccggaaactaatcctacgagaccacctatccccaagtacagcatcattgacgggtcgggtatcataggggaatttcttcccctccgcgctctgcgcggctcgcgcagacgcagaagtgttacttaatgacattgtcgcccccgtagtgtcctaagggccgtccccaccacatttcccttaacatgagggatccactcacgctccaaccgatcgagaaactcctccacctcatctcgaagccctccggcgtaggggcacacgtcctccgtcattacggtatcgactttcaactcctccgccaacgccttggtgaccgcctccggacagcgaactaacggtcggatgagtctgggccctccgcgccatgttcccgtgtaccatagcagtttcaaccgttcggcacctgtgagcagtgagagtatcaccgtagccgccgcgtcgtccagcgtatgacctaaggcgatgtagtcgaatcccttctcctccgcaagttgaccgagctcgatccttcggagtgtgcgacacgcgtagcagaccttgcgggcgttcatctcctctttgagctcgagtacgtcactttcgggttccagaaggtaggcgtgtatctccaggatcttcgcctgctcctcaacgacatcccaggcgctgattttcttaccgtccaccgtcggggccacgtgagccccttctacctcccacccgtacccacctcgagtctcttcagcccgaaggccaccgcgaaactgtccttacctcccgacatagctaccaggatcctcgaacccggccgcggatggccggatctccgaacgcactccttgatcttgtcctcaatcactcgggcgggatcgtcgggtgtacgtggtgggcgtggacctggcggcaaagcccggaaaccccgccggcttcgcagtttggagagaaggggagatcgtgtgttggtccgagtcctccgatgatgagcgcgtgctggaggtatgtcggaaggctgaactggtggtcttcgacgcaccgctcaccgagtccgatagaccctttcggcggcgggatgagatcttccgccggtacgctccggtcctccccctcactttcccgggcatgcgggagttatccagaagggcgcggtctctggtgcgaaggctggagttagaggtttacgagacgtatccgcgagccgcggaacgcttcatcaggctacatgggaacccggtggacgagcactccagggacgccgcgatatgctgcgcggtgggactggcggtgctcgagggcgaagcccacgtcttcggtgagccgccgaaggccgcgttgccgaagcgggagctgtcggtctccgtcagagctctaaccgctcctcccgacgtatgatgacttccttcggctccccttcttcgacctccacgatgacggtacccgtgagccccttgtcagccagccgctccaccgccttccggataccctcgaccgcggcgctccgttgtagatcctccttgtactcctcatacagaagacccaccaggtccctgagggatcgcatgaggtcgggtacttcctcacccaggacgtccgcgacatccgcccacttccagcgctgcagacacttggtgatgagcagcagttcctcctcctcggatagttccggcctgtcctcggtgtccaggaagtacgccttcgccagctcccgcaccgcgtcggcggcgatctcgtacgtatggaccatatccgcgtactttttgagccgtctgagctggccctcggtcagcgtcggccggtacctcaaggatgacatgggttcgaagagcagtcgggctacctcgggctcaaggtcccgatgtgtttcgcccagccagtccgccagcttgatccggaactcgaagttcgccctgttaatgatctcctcggcttcctcggagatcggccggatcacggcgacggagtactctccgctcacagggttgcggttagggctgatgtgcacgggcacgaaaccattacgcaaccagaatcgggtaagttcttcgttggctccaaatcctgttcctatccagtcgtagtccttctttttcgctatttttgccagctccttcagagctcgagagccaagaccgtgcctcatgatgtcgggatgtgtcgctatccttacaattctaagccccttcattcgtgggaaatccagcgcgtcgtgatgttgaaccatcagatccgggatcacgttacccggcggtcggtaaccgcgacgcatcttggtgatcacgtctctgggtatagtgccctcacgggctacctggagcgcggtgacgatcttgccggtctccgtcttgagggcgtaggcctcgtgatgtggagcgtcggcgagtaccatcacgtcgctgggtcggttgcggtagtgggccatcacgtagattccgatgaactgacggagttcctcctcaccctcagggtcctcgaaccagtacctcaggtccggcttctcgaactcgaccctcatttccttcacgcattccaggtcctccttgtcgaggtccgcgggctcggcgtccaggagaagcgtgtcgaacagccatcgttcgatggggtcatccgaatcgtagcggatcggctcgtgcatcttgaactctattaggcgaacatcccgtctcttgcgaacgttctggaggaacctcaccgagaacccgcggcccgcaccctcgtaaccgtgaattgtcgaggagtagaccaccttgtcgttgttatccaggatccgctccaggatgggtacgtgaatcgaagcggcctcgtcgactaccatcagatcgcactcgatctcggaagcctcggacggacgctcgtactcgaccacgaaatcgtcggtttctacgtacacgatgttccccttgtcgtcccgttccacatcgtactcgacaccgagctcacgcagtgcctcgagtaggaactcgaagagtacggcgacgttctcgggctcggacgccgtcaccacgacgtcgtacacgtcggtcgtgacgcccgcaccggccacggcgattccgagaagcgccgacttgccccgccctcggtccgccgtgaggatgagggcggtcttaccgttcgactccagcagctcttcgaacctgatcaaagcccggaactgatcctcggttgcacacatccgatagagctcttcgggaagcacggcgtcgtccggtggatcgagatctggccgctctcggcgcttaacctccacctcgaggtcgacatcttccgacggttcgggctccgcggtccactcgtccgtatccactatccaaacaccgtcgtgctccttcagcttcctgatgaaccgccggttgaagcgcttaccgacgtgatcgagcgtgtaaggtggtgtcactaagctcttgtggaaggccgtccacatgttcctccagcggtcgaagggcggggtctggaagattacgagaccacctccacgaacggtttcgacgagacgaccgatagcgtccggatccaggtcgtaggagaggtcgatcaccatgaggtcccaggtggtaccgagcgcccgtttggagccgctgaaagtgagcgcttctaattcgtactcgaagttcgcttcctcggcgaacccctcgaggacgcggcgaaactcctcgtaacgctcacgagcgtaggtatcctccttgagactgtccgtcacgtacaggacggaaatgggtctgtcccggacgtcgaaaaggacgtccgcagctcccgccgtcacgacacccgcggcctccgctttgccctcatcaccctgaaacacgatcatccttcggtgccggtgggctaaggcctcggcgagggcttcctcccccacgtcgagcacgatctcatcgacgtccgcgaagtccagcacgccctcgtcgaagaacacttccgccttgtccggcattccgcgccccctccgccgcactattcccttgacggtgagattcgacttaaagcccgagatggtacaccccactcggggatgaagacggacctcgggccgaagtccgatggggagggtccgcgctactgacccgcctcctcgggggacccgggttgacccccaggatcatggtggggacctccccgttcctaggagccggccagttcgggcatcgggcccttctataccggcgcaccttctaccaccgtcctgaaaacatcgttgcgctgctagagtactgcgccgaagagctcggcgttacgggcgttcaagccctggcggatccggtcattatcggggcgctgagggacgcggatcccgatctggacgtcgtggcggtagtgggactgaggaacttggaggaggagctcgaaatgctggaaaacctgaacctgcgtgcggtgcttctccacgccagctgtgtcgatggtgaggacgtcggagaagtgtcggccaagctggacgaaatcagaagccgattagatgttccggtcgggatcgccacgcaccgaccggacgagacgctccctaggtgggaagataaaaagacggcggacgtgtacatggtccccctgaacccagttggggcgttcatgggagaccagaaagccgttgaggagctcttggccgaaacggatcgaactgtgatagcgaagaaagtattggcggccggatccttaccaccggaggaaggactaccgtacgcagcgcgttacgcggacgccgtggctgtaggaatcaccggaaagaaggaggcggaagagaccctgaggatcgccaagaggtacttcgggtgatgaacccctcgggagcggacttagtgaagagacgttccagcgctgatgcttcgagggcatccttcaaggacaaggaggtcagaggtcgattttgacgtcccgaacccgctccagaacgacccgttcccctgttttaacctccccctcgaagtcgactagtacggccccgcgcgtaccgtgagtgtccacgattttcccctcgactcctccctccgtgcggactttctcgcccaccagacgctcggcgtgctccttgtttaaagctagtccatcgacgaccgctaagcccttccccatatggtcggcccttgtaacgcgcccacgtcgcctggagacgcgcttgaatgtctcacgcttcgaggtatcctccacgagcccggagcccgctatgcggagcgttgtcggcggtaagtccaacttaacgaggatcgtcctatccccctccctcacggccacgggctcgttgagcttcgcatacaggtaactcgattcgccgggtcgtagggagtctaggaggaacccatcgtcgtgaggcacgatccgagccggtacggacctcattccgacgtgtatgtgcagcatggtcttctgcccgatggattgggggaacagggggtctatttccaccttcaagtcaaggtatctggtgacccgcagggaaccctcctcggccagttggaagccccgttcgatctcttcctctcggatccctcgtagcgctattccaacccgatcacccgcacacgcttcctgcttgtccttcccgaagctctggatggacttcacttcgacggtcttgccgatcgggtacagtgtcagttcatccccgacctcgacacgtccggtcagtacggtaccggttaccacggtcccggcacctttgacgtggaacgcgtggtctatcggcattctgaacggagaatctagatcacgattgggaggttccagcacctcgagcaacgcgtctttcagatcctcaataccctcaccgatcttcgcggagaccgggattatgggagcgtcttctaaggtggtcccctggagtactcgtttgatctcctcgatccgacgctcgacggtcttttcgtccaccaggtccaccttattgagggcgatgaccccacggtcgatacccaggtgattaagcaccaccaggtgttccccggtctgtacctgagggccctcatcggccgctacgaccaagatcgcggcgtcgattatttcggccccggccaccacggttctgatgagatcagcgtggcccggggcgtctaccagtgtgacggtgtaatcaccgagctcgaagctggagaacccaaggtctatcgtaatcccacgctccttctcctccgggtgtttatccaacgccgccgtagaaggcttctcagtcagctgcgctgcgagtgccgtcttgccgtggtcgatgtgtccgaacagtccaacatgtactacgggcacggcgctgcatcaccacccttcgtcgaagaagtatcgcaccttcgcccgattgaagagcgatgaggctcccgccactgcggccgctgtgaaaatgtcttcccctcccaatccaccctttgccagcagtacgtaggcgactactatcgggatgggtaggacggcatcgatggcacagacacggcggaaggtgttcctaacggacaccacggtatcgatgggcatccccatgaggacccagtggtaatgccgcttcctgagggcgatgacgcaaggcagggtcaccaaggcgatgagcgtaccgtagaccagcgccttgaactcggtgatacccataaaatagaacaccttacgacggagggcggtgaacgccattaaaaggccgggtatagacgcgatccccgtgaactgcaaccccaggattgcgaacgaaagtttgagggccctcctaacgcgtacgatctccgcacccgtaggcggagaaccgttgcgagctttcgtatcgaatatatggatccacagcagcacgttgatgaacagtaggaccacgccggaggcgagcaggtatctcggaccttcgcacgccacgatcaaatacgctgtcccgtaggaaaacgccaggacgaggaggtacgtccacagttctgctgtcgccgggttcaacgtcgctcacccaaggtgacgtacttcgagcttgaggttcccgaggagttctcggacgttgagccacagagcctcggccccggcgggagtgatcccgtagactggaacccggctaccgacttttaatatgtacctacgtccggccgcacgtcgcacggccttggaggcgcagccggtgattatatcgcaatactgaaccagtcgctcggcgtcctcctcgtcggttcccgtagtgtgtaccgcggctatcagcacatcgtcgccgaactcctcccgaatggcctcagcgtctccggcgtccgcgacggttacggcgacgaaccttcgcccctcctccagcgctatctcgacgccctcacgttgatcgatcctccctagtacagagcagccggagtcttccaacctatctacgacctcggggatggggtccgtatcccgaatccctgagatttcgccgcaaagaccctgaacgatcgccggcttgtcggtgacgaccgtacccgcacagtccgagactattacggcggcgtcgatgagcctgtgttgtagacacgtcatcagtgtctcagagacaccgaacggagtgtagcgacggcaggaccgaatcctacgcttcggggtgaacatccccacctcgttgactttgttcaaaacgtggcgttcggccgcctccctggttaacttgctgaagccttcccggcgacgcatcaagggacaccgctcgatcatggggtcaccttcggcgcgaacctccacgtcaccgtccttccagatcacccgtaccggtgtcttccccagacactccatcatgtgctcatacttcgccacctcgacaccctccgggggacgatgtaccgttgcgtctgacaccgatagggtgggtcgtcgagcgtacggacgaagagggacttgtgaaggtgagggagagatacaggaagtgcctcgaggggttggagggattctcccacgtctggatattatggtggggacatgaagcggatcggacagttacgagggtaaggcccgttcacggggaagtccccgagctcgtcggtgttttcgcctgcaggagtcccgaccggccgaatcccgtgctcctgacgctttgtcggatactggaagttcgtccgaactccggcgagcttcgggtctccggcctagacgcccgagccggatcgccggtggtcgatatgaagccgtacctacccggttacgacgaacccgatggggaggtgtcggtaccggagtgggtcgagatggtcaaacggggtcaccggcctcctcgaactcgaggtcaccgtcgatgagcccacgtagtacgtccgctagctcgtcgacctccacgcggacctgctcggtcgtgtccctgtccctgatcgtcaccgtgtcgtcctcgagagtttcgtggtctacggtgacgcagtacggaacaccgatctcgtcggcgcgagcgtatcgtctgcctatcgaaccggagtcgtcgtactcgaccgtaaatccttcctcacgtagcatgcgggccacgcgtcgggcgtactcgaccatgtcgctgcgcttcagcagtgggaacactcccacctcgatcggcgccagccaggccgggaacctgaacacgccctcctccgggtcgaagttgtgctcgaggacgcaatacaggatacgatcgataccgtaggaaggttcgatcacgtgcgggtagaaccgctcgcccgtgaccttctccttgacgatttcgtagcactccggtggcacctctacctccttgccgtcgacttcgacggtgagacctcccttcagctcgtcctcgctctccgcggtgatccgacgtagcgcctccgcgatcttcggggcgtccgacttgaacctcggtccgagctccttcatcacgggttccgggcggtagactatcttgggctcctccagctcgcggaaggcccgtaggtcctctccgctgtgttccgagtgcttcttaaggtcgtaatccgtcctgtccgcgatcccgacgacttcaacccacccgaaccgctccagcttcacctccacgtcccaacagtcgctggcgtagtgtgcccgctcttcgggaaggtgctgacgcgatcggatggcttcgttcgggacccccatctcgttgagcatacgcttggtgagaccgaggaagtagccgatgggttgactgaccatgccctcctcgactgcctcacgaacggacatctccagcatctcgccgttctccttccgctgttcctctatggggtagaacttgaggacttcgtccgcgtagcgctcgaaccctgggtactccttctcctcggggtcgaagaagacttcagcctcggcctgagtgaactcgcggagacggatcacaccctgtcgcgggctgatctcgtttcggtacgcgcgacctatctgcacgacgccgaagggaagcttctggcgcgcccatcggtaaaggtccttgaactggatgaagatagcctgggcggtctccggacgcaaataccccgttcgaccctccttgggaccgatgttcgtgtcgaacattaggttgaactcagtaacctcagcgagctccccaccgcactcgggacatcggaggtcgtgctcacggatcaagtcctccaactcctcgggcgacattccttcggcgtcgactcccagctcctcctcggccaagtgatcggcacggaagaactcgccacactcgctgcagtgagtcatggggtctatgaagtgctcgacgtgaccggaagcctcgaacacctcgcctatgagcaggttgggagcttcgatttccatgaaaccttccttatggacgtagtactcgcgccacttctcctcgatcttccgcttcaggagtgctcccaggggaccgtagtcgtagaagccccgggctcccccgtagatgcggaacgcaggcagtatgaacccgcgtcggcgtgcgatctccatgatacgttcgtagacatcctcggtcaattccgtgccccctacctcatatctcgtagactgcttccgctaccccgtacagcttgagtacgtgctcctcggccacgaggatcgtcttcacgctctccttggcgatactctccaggtcctcccgatcgaactcctccgctcccaggatcagggtgagatcgcgcccgtcaccctcgaacttcggcacgagatccgagtcgtcgtcaccgaccgtacgcaagctgggctcgtttcggacccattccacgagccggatggccgcgttcaagacttcggagacacgttcagaatccttcacgacgatccccacggtactgtgtttacgaataccgagcaacgcctcacgctggtcttcgtcgggtctgaaatcgtaaggttccacaccggcggcttccacgacagcctccgcggccttcacggggtcctcagaggacgtgatgtacccgcccacgatcaccaagtccacaccatccagctcctctatcttcctcggggtaagaccacctgcgaccgcagttctcgcgggacaccggtcgaccccgaacttgtggagtagctcttcccccgtgatcggctcgtcgatggccgcgtggagcaggaggtagtccgggaattcctcaagtcccttcaacttcgacaggacgtctacgggattgacgccgatagtgtccactaatgccccggcgcagagctcatgtgccctggtgacgaacgatcgaatcgtctcctcgggcgccgcacccagcacgcatcccaggttcgccccgtgtttaatcgatagctccgcctccagtgcccccacgtccatcgttttcgtgtcggcgactatgggacgctccggaaactcctcggccaaccgctcgatcgcccgcgatccttcggccttgatgagcggtgttccgacctcaagtacgtggattccggcctccacgctcgcttcggctatttcgatggctttgggcagggatgtaagatccaacgctacctgtgtaagcatccgctgtcccccgccacctctgtgaggacggcttcgaactcctccggactcgcgtcggttttcacaacggctctctttgaatagtgtggacgcaccgcgttgaatccctcctcacggagcccctcaagtaccgaggtcagactcggcaccctggataagcccaacctcgacgcccatcggtggatatcgtaagcccaaggattcgtcccggtctccttcgccacagtctccaggagttccgcagcctcttcgagcccgagttcgcgggcgtccgaagccgcacgttcggcccgctcccggtccgcgaagtcgggcaaccacaggggtcccaaccttactacgctccctgacccgcagcgcgggcactcacgatcgaactcgcgctccgaagtgtacccacactcgcgacagtgcagaaggtaaccgagccgttttaacgcccgatcggctcggcgggctcctcttcggatctcgccgattacgcgcacatgatgacgctggaagaacgcgatatgtggttcgaacgcgaggtcgtacttcgcacacgttcggacgatgtacgaaatcagcgcgcggatggccacttcctggtagaactcgacgcgctcaacctcgacccaatacttcctccgggccgagcgcgggtaacgccctgcgagggccgagacgtcggtggcggagatcccgaccacgccacggttccggaccgttctaacggcggcatccaagaacgggaccggaggcccgaacggatcgatgtcgacgtaatcgaaacgacctgccagctcatcttcgtgcatcaaggcgttcgcatcacggttctcgatcctgcagacgtcctcgacgtcgttcaaccggacgttctcctcgatcagctcgaccgcgcggggattgagatcgttgaggacgaccacctcaggactcaactcgacggcgatgcggatcccgcgagcgcctactcccgccagcggatcacacacgatcttcgggccgtattgcaccagcgaggataccgttaaatcgcggctcagttgcattgcggggttgtagaacactgggtctctggcggagggctgcccgcgggtcttcgggactttcagcggcgtgcggccctcggtgattatctcaagctccatcgccctgtccctggccctgtccctgagggtgcgctcacttcagtgtcacctcggtacccagggcctggcccgggagaccacgctcgaaccggacgcgtacggccccgttgttgccgtgggtgtcgaccactttaccccgaatcaccttacccgtctccgggtgcttccagatgacttccttaccgatcaactgggccgcctctgatctgctctcgacaccctcaaactctattatgcactgcctgggatcctgcgtgtgccgtcccatgcggtagttcacgatcacacctcgcttgacctcactcacgactatttaccccctgggggagaccagttgtccaagctcgccatcgagggaggcagaccgattagggaggaccctataccgatcgctcaacctatcctgggtgacgaggaggcccgtgccgtcacggaggtccttcggtcgggccagctcgctcagggaccacgcgttgaggagttcgagcgtgagttcgcccagttcgtcggatgtgaacactgcgtcgcgacgagctcgggcacgaccgcactgcagctcgccctggagtccgccgggctcgggccgggcgacctcgcgatcgtgccgtcttttacgtttatcgctactgcgaacgccgccttacacgtgggcgccgacgtcgcgttcgtggacatcgatctggaaacgtactgtatggatccacgctccctggaggaggtcgtgaagctcctgaaagaccgcgtgctacgtccccgcaccgtagcagtgatccctgtgcacctctacggccaccccgctgacatggacccgatcctagagatcgcggaggaacacgatctcatcgtgatcgaggacgcggcacaggcccacggagccgagtacaaaggtaggaggataggatccttgggagacgccgcctgcttcagcttctatccgaccaagaacatgaccacgggagagggcggggcgatcaccacggacgacggggaactggccgagcgggccagaatgctccgctcacacggcgagcgcgaacgctacgatcacgtggagctagggtacaactttcggatgacggacatcgccgcggctatcgggatcgtccagcttcggaggctggaggagttcaacgagcggaggagggagaacgctcgctactacctcaaggaactggccgatttagaacccctcatcgaactaccgaccgagaagccctgggcgaaacacgtttaccatcagttcacgattaggatcaacgtggaagagttgtcctgtacgagagacgagttcgcggaggcgctccgtgccgagggagtggactgtgccgtacactacccgactccgctacaccgacaacccgtatacctcaggcgcggttatcacgccacggagctcccgaaatcggagcgtgcggccgagaccgtactatccattccggtacatccgggtttgtcggaggaggaccgtcaggacgttgtggaagccgttgagaaggtcgtttccgcgttttcccgataggctcacacgaggggaacgcgcttgccgcgcgagaagtgtcctaaatgtgacgggaaggggaagatcccagtcggagagaccgaatgtcccagatgcggtggtaccgggttcgtgggcgacgtggacatcagcgagcacttcaaaggagcggctcagcacgccgtcgaagggtacgatctcgccagctcacgtgacgtcccctgtccgaagtgtcagggtaaaggtgtgataacggtctacgaggaatgcgacaggtgcggtggtaccggttacatcgtgaagtgtcgggagtgcgggaaggaactggatccagacgttgaagaggacctatgcgaggagtgccggaagaagatcaaacagattcgcaaggaaaagctgccaaaggtgaaggtcctctcgccggcgtgcgggtacgaggacgtcgaagagggcgagctgtacaagggcaaggttagccgtgtcgagaagtacggagttttcatcgaattaaacgacagaaccctcggtctgctacaccgtcgcgatatgggcgacaaggagcctcaggacttctcgatcggtgacgaggtggtggtgaaggtcacggacgtgcgaccggaggacggcgagatcgacttcacgatcgaaggtatcgacccacggcccgatcgataccgcgaggaggtcgtggagaaggagctgaagcgcgtactcgtacacgacatcgacgaatcgaagatcggcgagaccgtcctgattaaaggtaagatcatccacgtccagcagacacccggaccgaccgtattcacgctacgagacgagagcggtagcatctggatggcagccttcgaggggccggggatcagggcctatccggacatcgaggcgggtgattacgtccgggtgatcggcgaggtcaccacgcacgacggccagctccaggtcgagatcctcgacatggagaagctcgtggggacggagaaagtcgagatcaaacgagccatcgacgaggcgctcgaccgggaagccgagccgcccgaggatctaaaacccatggtagacagcgagatcatcgagcgtctgtggccgcggatgcgcgaggtggcgaaggagatcaagcgggccgtactcgaaggtcggcccgtcctgatccggcaccacgcggacgccgacggtatctcgggcggagtagcgctggaggaggcgatactcccgatcttgagggagaacaacccggacccggaggcagagtaccacttctacaagcggttcccgaacaaggcgccgatatacaccctcgaggacgcctcacgggacctgaaccacgccctagaggacgtccacaggtacggccatcaggtaccactcctggtactcttggacatcgggtgtaccgaggaggacgtacccgccatcgaggaaatgaaggcctacggcgtcgacgtcctggtcatcgaccaccactatccgggcgaagccgtgggagagaacccggaggacggactgaaggagttcccgatcgacgaacacgtgaaggtacacgtgaacccctacgcggcgggtggcgacggcaagaacatccccgcaggtgtcctggccgtagagatcgcccgactcatcaacccggaggtggaggacaggattaagcacctcccggcggtcgcgtgtctgggggaccacgccgagtctcccgaggcggagcagtacctcgagatcgccgaggaggccggtttcgacaggaagtggctgaggaagatcgcggacagcgtcgacttccaggcgttccagctgcgtcacactccggggaggcacctgatgaacgacgttctcggcactacaggggacgaacaccgacaccgacggctggtagagaacctctacaagcagcataagatcgcctgcgagcggcagctggaagccgcgctgaagggagtcaaggagtacgagacggacggtgtgaaggtggtcaccttagacgtggagaagcacgcccgcaagttcgagtaccccggcccgggcaagacgtgcgggctcgtccacgacctgaaggtcgaggaagaaggcgacgatgcaaaggtagtgaccatcgcgtacggaccggacttcgcggtgatcagggccacggagaacctggggataaacctcaacgatatcgtatcggaactggaggaagagatgccagaggccgcggtggagggtggaggtcacgagaccgccggctcgatatcgttcgtggaggcacatcggaacaaggtcctcaaggcgctggtcgagaagatcctgagggacgccacctcttaacctacacgcacgcatttcacgataagccgctcgcgcgccgtggaaagaggcgtgcaagtgaccaaccacagctcgtccttattcgacgcatccgggtcgatgacgtaatccggagatactaccactttatcgtacaccacgtacacgtacttggacccgaaccagtacactatgaccttatcaccgcgctttaactcgtcgaggtgtaggaagggagatccgaaaagagtacgatgtccgtagaacaccgtgattccctttttaccaggcggaggcgtcatgatctcgtaatacacaccgtagtccggcgaggtggtgttgatccgctcgcggagacctaacttcgggatgaccaactcgcagtcgggtatcgatacggattcatggtacatgaagtaagcgacttccttggccgcgagataccccaagtacgtcgtggatggagcgagcaggagaattcccggaatcaggtaccgtaacctcacttgctgagacccctgtagactaggtagagcccgaccacggccgccagcaccaccgccgcgatcaggaacagggactcacccgctttgtattgacccgccgtgacggcgccccccgcaccagcgcctccggcgccaccgacgcccgctccacccgccgcaccgccggcgcctccaccttcagctccagcccccgggccgccggctcctctactgtactccatgacgtacctgatttcggggaacggaccgtacggtctgccgtcgatggttactctaccgtccttaacaccgattttccagaccgggacgttatcgttcaccctcgcgggcttcgggtcggcatcgaccagtctaccgtccgctagaacgaccaccccgctgagctccgtttccggggcactgttgacgtttgcctttaactccatagagaccgagatccgctcgtaggagcactcgctcatgttgaacggccagccggcgttcaccatcagtgggaaaccttcctccagggagacgttactcgccacgatcttggcgtacgcccttgatccagagatcttgacgtcttcgaccttggcacccgagataccgatgtccgactccctaggtttttgagcacccttacccgtggcctgcacctcgatgacaagtttggagatagtcaccgggggttttttaccctgaccggtgggctcggtgggctgtcccacgggcgcaccgggggactgaccggtttgagctatggtgatggagcctaccaatgcggagtaagccacgcacattcccagcataaccagtatagtcgattttaaggacagtttcaacagggttttcccccgcagtgcgtctacgtctccggcagtatccaaattcctcctttgacactcgatgctattaacaccttaggttgaaccgcgtctttcggtatttcaacgattactagtaagttctcccagctccggataccttccctagcctcaatgctcattaactgacgaatgaagccgcctccccggcgtgccctttctacggccatcgctttcaccagatcgcggagatctacgagcgccaccggcgacaggtgaggtgacgtgactctggtgttcaggcccgggtaatttttaagcgtatacgtgacacccgtcccgcctccgacggcgtacgatctcccggttacgaggcctgccgggaataccaccttccttagggccaaatccgagctacctgtacggtacatggtctccaacgcagatgctgatactaggtcaattttgaagttatctggtaacccgcctttaatcagcataatatatcgaactatagccccgcttatttggttggggcccttatatgcttccttatttttaactttagcaattttcttaagagcccagttcgtaatcgatagtgtcaccctatccccgacttttataggacccgtcttattcggatctgcccaaattgctatcagtactgtttcagggcgcttcacttgaactttcatcagttcgtcaacacccatcatccttatcttgttcaatgcgtctctgacagtaagcaactgtggtccctcaggcgtaactaattctaccctccctttcttctgattcattttgatttgcttcgccagatacctcctccactctaccgttgcagcgcccactacatcaattgcttgtaactgttctggagtctctgctgagagtatttgctgctgcaatttagtccgcgttggtgaagctgcgagcggtcctgtgaaatatgtgtttagctctttcaacttttgagcacgaagtttttccaactgctctacatacggtttgtatacgaaaaagtagtacgccccaccgccggcggccaagaaaatcaatcctatgacgatcgctccgatcacggcgtggcgtctctcttccggaatctcaacgaagttcgtcggtctcaccggcggccgcggaagcaccctctcacccccctcaccatgtaccacgaaagtagcgccgttatcgtgaccgaggcgacaacttccagcccccgttttatctcatccggggggatcaggaacgagaacaggagcacgagggatgagagacctcccgcggccaggatcgccggatggggacgcttgaggctcgggaacttgatcgaggagatcatcagtaaggccgaggtacccagtatcacggtattgaggacataccacaggtatgacggacccaaatcgactgttaggaaatagagactgctggctatcgttccgacccacggaactgggaggccgaggtagtactcacccgggtcgtacccgtcgacacacatcgcgttgaaccgggcgagtcggagggcaccgcagcaaaccatcaggacggcgagaaggtaacacatcggagccggcacgagaccggcggtgactactagcacggccggtgctaccgcgaacgagaccaagtcagccagtgagtccaggttcatcccgaactcggactcctttcccgtcctcctggccacgaacccgtccaatgagtccgcgatgaaggagagtatgatgaacctggcggccgcacccggaaaccctgcgatcgacgctagaagtgaaaacgctccgaagaccacgttggtcagcgataccacgcacgcgggtgtgatcagctccgagatcttccaacgctccacgttacctcacctcttcaccctaatcacgggagtctcgccggcctttacactgtcccctttacgtacgagtagctcctccacgctacttcgggggacagccaggtcgacccttgacccgaatcggatcatgccgatcggttcccccttgttcacctcgtctccctcctgtacgtacaggtcgatcctgcgcgcgaccgctcccgatactaaacggacgacgaacggggggtcgccgtcgaacagcaacaccgcccggttgttctcggtggccgaatctttccggaaagccggacggaaccgtccttttaaaatctcggcctccacgacccgcccgtccagcggggcgcggttcacgtgcacgtcgagcggcgacatgaacacggacaccgttatcgggtcgtctaggtacgagctcaactcgtcgtcggatgcctccccggcttccatcacgtaacccagcagtctaccgtccgcgggtgataccgcgagggaagggtccgaaggaggttcacgcggagggttacggaagaagaacgccaggaacgccgcggttccgaggcagaggaaggataaggggcgagaccatgggaacagtgctgcgccgagggccgccggtggtgttacgaacttccaccatccaggcgccatcaaatcgctcacacccgctcacagacgaacacgaacccggggacgatgtgtacccacttcaggtacttttccagcacgcggagtggaacctcgtgatggagtaatttagtgaagtatccgggccagtgcgtcagctgcacgaacctgcctgaagtcttaagaactgtcgcgcaggatcggaggaactcgaggggctcgggcacggttttgacggggaccgtcgacagtacggcgtcgacgttatccacgagctccggtagctcgcgtgcgtccgcgaccacgaactcgatggagtcttccaccccgtactcctccgcgttcctccgggccatgtcgatcatctcgggatcgacgtcgacggccagcacttcacaccccatctccgccgccgcaatggcgacgactccgttcccggtacccgcgtccaccacgaaatctccttcctccaccccggccgcccgaaccatgaactcggcggtttccctgcgggtaggggccggcgcgcccactcggagcggttcgcggagtgcctttctgacgaacgcccatacgctcatggtatccccccaggggtggtggtgtgggagttcgcgaagtcttaagacgcttggcggccgctctgaggtccggacccgaggagctggacatcggaatatacggggctcccaacgtgggcaaaacgacgctggcgaatcgcatcgcccaggattgggaggcggaggagttcggtcaagtgtcggaggtccctcacgagactcgggaatcggtgcgtcgagaggtagcgatagaggtgggatcaacaacggttaaattcaacatcgtggacacacccggcatcgccacgaaggtagactaccgtaagttcttggagtacgggcttgacgtgcaagaggcgaaacagagggccaaagaggctactcgaggggtggtggaagcgatcaagctcctaaaggacatcgacggggcgctggtcgtcatcgactccaccaaggatcccctgagtcaagtcaacgtaaccctgataggcaacctggaggccaacgacgtcccgttcttggtcgttgcgaacaaaatagacttggaggaagccgaccctgaagctgtccggaaagcgttctcggaataccccgtagtcgccgtctccgcgaagaccggggagaacatggctaagctgtacgaagccatggttagggagtttacgagttgacggacggcgaggttaaagtggaggtgctagctaaatcggctttagagaggatgtcgacggaggaggtcgtggagtacgtcatcgaaaaaactaggggcgggtccgtgatcgtacttgagggacagttagacccggagacgctaacacagatcatccgtgagactatggaaaatgtggatctggaagagttcacaggtgtggacatctacgtggtaccaccgaaggcgaagacggataaaggacttttcgacagactgctgggacgccagtccgaggagggtatgaccgtgatctcacccgcggacgttctgaaggatatgaaaaaggggaaggatttcatcacgctaaaactcggatgacgggagatctgctatgcctcatatatgtataagatgcggcgaagtgtacgacaaggttacaaaagaactcatacgtcggggttgcttaaaatgtgggtgtagactgtttaagcgggtatctgaggatgacggagataacccagcaacgatcgttgtcgaacgtgatggcgtttacacaattaacattgaaaacattgacgatgttgtaactgtatataaatcaggtagattcttcatagtgcttccggagcaaaagtacggggattaggcaattgaagaccacagaaagacctgaactgagagttaaaatacttagagcagctgcagtatctcacgaagacatcagtaaggaaatggattcatactgtgcaatactaggggatccagaaagcattgatgatatcgtatatgaagtgatgcgtctatctaattttgaaattatcgacaacagtatagtgaaaactagacacggaatagtagtttggaggtacggagttgtactaataaaatcgacgcctgagattacttcattaataaagcgaatagtgagtgatacgaacctcatgtctgtagtatttaaggccaaggacgggaactttctgatagcaggaccggacattgtcttgaaaaaaattttgagtagtgctagagttaaaatgaaggttaaagtgaccaagcgtaccagaggtatagctttcgttgaaacttccaccgtggtattcgatgcgatgcctggattcttaaaagacataattaacacgcttctcggcatagaagaggaagtattcagtattttggtcctagacgttgaagatcctgaaaagtttaagaagatcatcgataaaggaccgaatgtatattggaggagaattgaagaagataaagagacgtagaggggttgtaagcgcttgccattgtggaagagaaagaaaaaagaggagacaaagcaagagaaaaagattgaagaagagaagaaggagaataatgaaaagaaagcttctaaactaccaacatctattcaagaggcacttagtgaagagcccgaaatagagatagatgaagggctcgaagcacttggtatagatttaggcaccatgaacacagtggttgcgaggccggccgaggaggagtttttggtgaagcaatttccgtctgtagtagccgtgaagaagggtacgaatcgagttttggctataggtgaagaagcccgccgaatgctcggacggactcccgaggacatcgtggccgtgcgtccaatgcgtcacggtgtgatcgagtccttagagtacgccaagttcatagttcagtacgcgatcgagctcggatcggacaacagtcccgaagaaatcgaacgcgtcgccgtaggagtgccgggtgatgcatccgaggtggagagagaagccatcgaagaggcgacctcggacgtcggaatggataaggacaacgtgatcgtgatcaacgaagccctagcggccgccatcggagccggactgccgatcgcggagccggacggtactatggtgatcgacatcggagcgggttccaccgatatcgccgttatatcgttgggtggaatcaccgaccaggagaccatgagggtcggtggggacaacatcgaccagaacatcgtcgatctcgtggaggaggagttcggggtgcggatcggcatccacgaagccgagcgggcgaaagtggaggtaggtaaagtcttcactgagaccgaggacatcgaggacaaggagatcgaagtggtaggcaaggacatcgaaacgaacaagcccaaggagatcactatcgactccgagctggtggctaaagccgcggagcccgtcgtccaagagatcatcagggccatcgagagtatcctcgacaggttgccgccggagttggtcccgggcgtgtacgagaacaccgtgctcgtcggaggtacctcactaatgcgaggcctccgagctaggatcgaagaggaaaccgacgtaccggccgagctcgtagacgatcccctgacggtagtagcgaagggtgccgcgatcgtagccgcggagccgaagaccttggagcccgagataagactcaaggctctgaagtgaagtacccagagcgtaaagcggccgggaaggctcccgttgcgccttcgggcagacctgcatacccacacggtatactcagacggccacgggaccccgctggagaacgtattagcggcggaagagcggggactcgagacggtcgcattaaccgatcacggtcccgcatcacccgacggtctcacggatcggtccttcagacgtctcgtggcggaagccagggaggcggagaaactctgctcggttcgggtgtatgttggtgtggaagcgaacatcgtgtcaatctcgggagagatagacgcaacaccggcgatgctcagcgagtccgacatcgtgctggccgccatccacaaccctcgtctgatactggcgaacccgggaagtgcggaagaactacgacgcgcgatcgtacacgcgacgatcaggtgcatagagagtggagaggtacacataatcgcgcacccggtgtggatcctggagcagctccgatgttacataaccgcacaggaggcggaagaaatcgcccgggtggccgccgatcacaacgtcgggctggagcttaacgcgcggcatctccccagggacttcaccttataccaagtcgcgattcgggtaggggcaccgatcacgttcggtagcgacgcccacgcacctgaggaagtggggcggttcaagccgctccagaagctagcccgaaggctcggtatcgaaccgcaggatgtacacccggaggagctggggatcgtctgaccctgaggaccttaaacgtcgactgggaggcggtcaaagacgcgctgagcgataccgaggaaccggaagagcttgctgagctactgaatccccccgaactcgccgccgccttaccgtactccggatgcgataacccgcgggaattcctcaagaggctcgaggttcgctccgaccccatctctttagcgttagtggagatacacggcagggtcgcgaggaaggtgcaggagtggaaaccgttcgtgtgccctgatatccgcgcggcccgcgagttcacgcgagagatcgtggccaaggctaaagccgacttcttagcggagcgagccggaggatccgaagcgctggacctgtgcgcgggacccggcggagacacgttggccttagcggagcactacgacgtgaaagccgtggaccgtgaggtacctcggatcgaggcgctgaagatcaacgctcggctccacgcggggcacgccgttgaagttatcgagctagacgtcatggaagccgagcttgatgcggacgtcgtccacgcggatccgggcagatccggcgccaaggacccgaagcgtaccgagccccccgcgacggaactacgagacatgttctcagaagtcccacacatgatcgaagtgccaccagccgtgaaaccgagaccgggaaccgtagtcttcagtgcgacgggtgaggtccgttcagtctgctggaccaacctgaccgaaaaagtcgcagccgtgatcgcggagacatcagctgttctcgaaggccttccacggaagcccacggaagcgttggaacccgaagaggtgcgctacgttatcgagcaggatcccgccgtccgtaaagcgaacctttcgtggaagctcgccgaggagctcaacgttcatccgacagtcgtcgccggtgaggagacagtgttggcgtcggaagatccaccggacttaacagtcgatcacgtgatcagggtagtggaagtcggagaagagggcgacggtccgcctacgatacggtctctcggtgtcaaactgaacccaagacggttagcagagttgcgcaaaacgtacaaggagtacgacatcgtgtacgtaacgaaggccggtgtcctggccggaaaagtgatctacgaaagggagtgagggaaagcttgctggaagccgccggtgccgtgcttctgggttcggccgcgctcctgatggttggcagattgggtaaccgcgggttcttcttgtggctccgtaccgtcggtatcttaggtctgttggtcggaatactgtccctggcgctggccgccctgacggggagtgcgatcgcggggctggtcgtaggagtcatcactgccgcgatgatgtacctattctcctcccgtatagtgcgcatccagatgggagccgtagacgccgaggagttcctccggtacaagccggagtacgcggacaagttacgcagagtgcaggagatggtgtcgaagctagcgtccaaggctgggcttccggaacccgagctggtggtagttccggaagagaccggtgtcggcgggtaccccaacgccttcgccaccggacgccggtcgaagcccacggtgggagttacagaggggctcctgaggcacctggacgacgacgagatatacggagtactgggtcacgagctcgctcacgtgaagaaccgcgacacgctcgtcatgaccgtagctgcggccgtgagcaccgccatcgcgtacgcgttcgacccgtggctgaacgccatgtacaccgaggactgggaggacatagctttcctggtgctggcgggcatgttggcctcgctgatctcgacgctgctcgtggccgccataagccggtcgcgggagtacttggccgacgaggagggagctaagctctcggggaaccccatggcgctggccgaggccttggagaagatcgaggcgatagtcaagtccaaccccgcgcccgctaggtcgttgtccgaagtctcaacggcgcacctgtggatcgagaacccgttccgcggaggcctactccgactgttcagcactcatccgccggtcgagaagagggtcgaacgtctcaggcgcctcgcgagagagttgcaaggaccgtaacctcggcccaggcgtcctcgaggtaacgctgcacctccagggggctccagggatcgatccttcggacgcggcggaggagccgcttcttgaccttagccacctcggggtgttcgggttccacctcgggcacgtagagcggaacgtccagacgttccgcggccaatctcagcggttccagaaccagggacctttcgagttccgagagcgggtcgtcggttcggcacccggtcacgcgccggagacccatctcgaggcggcgaacggccacgtccggaagctcctgcaacactagctcctccgcaccgacctcgagaggaagggccagagcccgaagtggcggtaacccaccgatcggcattacaccgtgctcgaactgcagcacgtgggcgagctcgtgggccagggaagccttgacttcttggaagttccgagcggccccgatctccacggtcacaacgttaccttcgaggcgcgtgtacgtggcccggacggcgtcacaactagccaggagcaccggagaatctggcttaaccgtcgacgggagctcacgatacgctcggatcacgaagtaccggagcgatcggggatatatgagcaggactctcagcactgtctgacccgaacacccctttcggccaggtgctccttcacctcttcgatcgtgaatttcccatagtggaagatcgaagccgcgagagctgcgtcggcgtcggcctccttgaaaacctccaccatatgcttcgggtgaccgcaacccccggaggctatcacgggaatgctcactgcgttacacacctctcgggtcagttcgatgtcgtaaccttcttgagtaccgtcggcgtcgatgctcgtcaagagtatctcgcccgcgcccagctcctccaccctcttagcccaggttatggcgtcgagatctacgggctcacgacctccacggacgtagacccggaaccagtattctccatcgtcgttcgagaagatatgatccgccacgtgttcatgctccggcttcagaggctcccgctttgcgtcgatcgccactaccacgcactgcgacccgaaaatatcggcggcctcggagattaactccgggttctccaccgccgcggtgttcacggaaactttatcggctccggcggtcagcgcccttcggaagtcctcgacgtcggatatcccgccacctacggtcatgggaatgaacaccttctccgcggtgcgacgcaccacgtccaccattaaccggcgaccttcaggagaggccgagatatccaggaacacgatctcgtcggcaccgtgacggtagtagtgatgggccaactcagcgggatcgccagcgtcgcgcagtccgcggaaccgtacgcctttcacgacacgtccgtccttgacgtcgaggcagggtatgatgcgtttggctaaggccattggagtctccgcccacaccccggttcctcctcatcggggtcggcgtggggtagcatcgtcatcgacggggtggcattcgggatggtggccagggaccttctggattctatcgagaaataccttttggtgacgcgaaggatggtgaacgccgggatacctaaagatcgggcgttgaacaccgtacagcgcacctggggactcacaaatagggagaagaaagcgctataccgtatcgtgtggtcgagactggaatcattactcagagccggcaaaagggtcccgacgccgcttctcagagggcaggacttggtaatcgacgggtacaacgtgcttgtcgggctggcgtccctggacgccggggaagccgtactctgcgacgacgacgtggtgcgtgacttacggatgtctcccaagttggaggaggaagaggtgcagaccgccctcgaaatgttggagacgtacctgcgtcgcgttgaaccgcgctcagtgaggatactgttcgacgctcctgtgagcggtagtggtgagctggccgcgcgagtcgagcggtacctaaaagactcgttgaacgtcccggtacgggcctcggccgtcaaaggtgtggacgaaaagctggtgagggcccaaggagtgcccgtgacatccgactccggcatcatagatcgtgtgtcagcttatcacgacgccgtcagggaagtggcggccgcagaaggtatagccgtatggatcccgccgggaccttccgagcccaagttcgtacgtgctctcgtcccggaagggtaaggatgatgatcacgggaccgggatcgagggtaatccgatgagagtaagcggccacacctgacttaggggaaccgcgaatggttcggagaacctctgaagagatttcagaacgcatggaagactacctggaagccctatacctactttcgagacgcggctccggccgacatgtgaggatatcggaactcagcgagtacctggaagtgtccaaaccgacggcgttggagatgatcagaaagttagcagatcgcggcttagtagagtacgaacgaggtctggtgaaactcacggagaaaggtcgagagatcggtaaggaggtgtgggacaggcaccgggagatagcgtcattcctccggttcttgggtgtagatccgaagatagcggaacgtgacgcatgcgctatagagcactcgttacacccgcagtctttccggagactacgaaaactgttccacctcctgaaggaggcgaccggggaaccgaccgtgcgcgagatcctagataaagtgcggggggaagagggagattcagacggagttcgacatcgatcgtaagacgctgaaggccggactcagaaagctccggtcactggtcaaggtcaagattcgactagctagggagcacggtaccgtagaggtagaccgacctcctctacccatagtgaagagctggtacggggaggttctggaaaccgttgacgacgccgagaacttcttcgaaagggagctccgacgcatgcataaggtcgagctcgaggaagtacccaaggtggtattctgcgctttcgacgttatcgagggagtcaagcatgagttcgagcctgaaaagtatttatataagcccggggcgatacccgcgggagctcaggcgttgacactggatatcatgacggacgatcatagggaggatgccgtgtacataggggagccgggcccggaagtgagccgcgaccgttgggcgggccgtgtagtgtccgtcctcgcgaggctgttgccagagtgtgtggaggttgggttgctcgaagatgtcagggagctggagggcgtaagggtgaggatcgggaagttcaccctactgaactacgttactggcgcggcactggcgctctcgggggccgaggtcgagctcgaagttcagtgagcctttctaaccctggctacctcataatgccgcggagtgaagtaatagtcgaacgggtccctgctggaaatcctgtagtctctggggatctccccttcgtgtctggactttcttcttctcactccgagcaattaagttcaccccctaacgtcttatccttcgataaacacatgtaggcaattcagcgataattattgatttcggcccccgaaggatggagaccattgagcgcacatcgggcacactacccggcttggcgaccgtaattgttatataggatgcatagaggttgggctgatgggagcagggccgtggggtagcggtctatcctgcggggctttggaccccgcgaccccggttcaaatccgggcggccctaccactccgaatcgttttgagaaccataacaataaggggacggctctttggacgcgctgctgaagatctgcatactgaatgcgctggcggtggtagctttcgccgtactcgtctgggcggcttttaggtacgcacttccctcctggttcatcctggcgattatcgtcccaggggttctcgggtcagcgtgcgttgactacgtcatgatcagcgtcggtgtgtacgatggcccgtgggaaacggcattcgcgagcgttgtgtacgcggtggcatggtggacaggaagacccggaccgtccggcccggggtcccgttagggttcccccgggccatcatccggccggggcgttcaatcctcatccttccgctctatccggaacttcacgcggtccaacacgtgggcggcgcacgacagtcagatgtcgtagctcctgatcaccatttccaggtagttcaatacatcccgcttctcggccatcgagcggctccccctaagctagttccacgatttcgtcctctaactttttcgcggtctccttcagggcgagctcgatcgcggggacgttgtgagtggtagcgactatcaggttggcctccttcacgcgaccctcgtcgtcggtcacgtagtggtggatgagcgtaccacgcggcgcctcgacgatgccgactccttcgcccgccttgggctcgtagtcctccttgcactcgtcctcctcggtgatcacatcgtcctcgagcagcatcttggcctcctcacacgcggccacgagttccacgagccgggcccagttgatggtgagcgagtagttcacgcactccccgaactcgtcgacgtactcctcgtagagctcctgggcgcgctcggtcttcatctccgagcagacgttgagccgtgcacccggtcctaccctgtagataccgtccgggtacccgacgtccttcaggtacgggtgtttgacgtaggagtactctatggtgcgctccgcgatcacgtcctggtattcctgcggctcgaagcgcgtgacctcctccccgttcggatccactaccttcacctcgccgtcgtagaactcgtgcttgtcaccgtctgagacgagacccatgtggtaagtctcgatgttccctagagtctcgagcagatcgatgtcgtgcttctcccggtactcctccagcgtctctttgatcgcctcgatgccgaccttggcaccctcgtacgccatctcgatcatctcttcggcgcggttgagcaggtcatcgcgtgactccgggtcgaccggggaggagacgccgcccgggatccccgtcacggggtgtatggccttacctccggtagcctctacgatgtcctgaccgtagcgacgcagttcgatcgcgatctttccgacttccgggtcgtccttgactatcttcaccacgttacgctggagcgggtccgcatccggtccaaccacgtagtcgggcgccgccaggaagtagaagtgaagcgcgtggctgtggatcatgttcccgatgtgcatcagccaccggatcttgtgcccgccttcgggcggctcggcgtcgaagcacgcgtccacggccttgcaggccgctaaatggtgggcagtctggcagataccgcagatcctggatacgatgtagggaacgtcctccgcggggcggccttggacgaacttttcgaaccctcggactgcgaggactgcgaacttgacgtcggtcacctcaccgtcctcgacctcgatgatgacttcaccgtgtccctctaccctggtcagggggtgaatcttgatctcggccacccgttactcccccttcgagccgaagatcacgtcacgatgacccttcagtagagacgcggccatggagaacatgtagagcttcccaggtaggtcgacgagtccctccaggatctcctcgacgtcgacgtcggtctcgaaggacaccgaggcgatcgcatcgaggaacgccgcaccctgatccagtgcctgcttcgtcggtccgttacacccacggcacgatagtcctcgggacggacaggccgctccacatccggcgaccgtggccggtcccatgcacgggtagccctgttcgagcaggcacttgtccgggtcgggtcggccctgaccggtgcggaacttgatctcctcgatcgggatgtcctccttctcgcggggacattcctcgcacaggttcgtcgtcgggagttcgggctcccggtcctcgaggatggcggtgatgacctcagcgatgctctccggcttgggagggcagcccggcagcatgtagtcgacgtcgattacctcgggcagcggccgcacgtagccgaagagctccggaacgacctcttccggagtctcgccttcgtcgtcggtggtcggggtctccttgaagacccactcgaggatgtcgtccagttggtacaggttggccagcccgtggactccaccgtagcaggcgcatgtccccacggcgacgacgatgtcggcggcctcacggagttcttccgcgacctcgagatcctcctcgtttcggatgcttccctcgatcaccgctacgttcacgtgctctgggatctccttctggtcgactagtacgtagcagtactcgatctcgatggcgtcctccaggagatcgagtaacttctcgtggagatcgagcagtgacacgtgacacccgacacaggaggacagttgagccgtcgcaatcgtcgccttacccatcccgcgctcccccggcggtggcccgcgcgtgatttaataccggattgggattgaaggatcgaatgctacccaacagcttcgaccggggggtcccggaatagcccatattcacctacctgatggactgataccgttatggtggtgtgccgtattttacgctatggcggccataccggtaggtttaggggcgctgagaatccggtccgagggtcgtaaaaccattctggtcggattgttggcgggtctctcgttcgtgttcatgcaggtgccgataggccatgctcacgtgaacttaacgggaccgatcggaattctactggggccttggagttccgccgtggctgttttcatcgtcaacttggcgtgtgccctaatgggacacggaggaataaccatcgtcggattgaacaccctgatcaactggggagaagctgccggcgtgtgggcactctacaggcttctcagggagaggctggattacggtgcagccgcggggatcgccacgttctccgtcctagccacatcgtcggtgattccatcgttcgtcatggcttgggttatcaacaaaccggtacttccgttccttctcacactgaccacggtttggatagtcacggcgatcatcgaagccgtaattacggcatcgatggttaaggctctcgcccaaatgaaaccggactgggtgagagatctgtgaggttcaccgaagcactggagtggtcgctgacggctgagaccgtgctccaccgtatacacccatggtcgaagttagtcgggctgatgaccacgatcttcgcctcgatgttactgtacgatcccgagagcatcgccatcctgtcgataccgtacctaatcgggtgcatcttagcccgcgttcccgtccggatcctagcgcggttgtcgataccgccgatggcgttcttgggcgcggtcctgctcctgatgttgccctcgggcgtcccgggccgcgaggtgttgctgtacgccgttcggggcgcgaccgatctcttagccgtgctcgtgacgacgctgacgacgcccttcaacgcgctgtggtcggccctcgtcgtggtgttcccacccacgctggcggagaccggtctcatcttccatcgctcggtgtaccgggcgttcgaagagttggagggaacgttgaacgcgatccggatccggggatggaggctcaggtcgatcaacgttctgggatccgttatcgcgactctcttgattcgaagccaccggagcgcggaactcgtgcaggtaagcgtggaggtacgcggggcgacgggtagggtgcgaccgttgaaaagattcgagttcacgcggatagacttcggatggttgaccatggtgttttgctccgtggcgttatcgggggtggtctgaaatcgggtatgccgttaagatcaaatgcttgactcacgagtatcccgacggcacttgtgctgtgtgcgggttgagtctacgagtgaaagaaggtgagtccgtggttgtactcggaccgaacggttctgggaagaccactttactgcaccacattctcggtctgttgacccccaccaagggacacatccgggtcctaggtcacgacttgccggacggagtacgggaagttcggaagcgtataggcgtggtcttccaggacgtcgacgaccagctcatcatgccgaccgtattggaggatgtggccttcgggctagtaaaccgcggcatgccgcgagaagaggcgttcgagcgagcccgtgagatcctggaacggttaggcattgaagatctggaggatcggccgccgcagttcctcagcggcggacagaagaggttggtagccttggcgggggccgtagctccggagcccgacctcctgattctcgacgagcccacctcaggactcgacttccgcgccaccagactgttcgtgcgactcatcagggagctcaaggaagagctggggttcacgatgatactgacgacgttcgacgtggacatcgcggcggcgttggcggagcgcgtcgtggtgatccgagaggggaagaccgtggccgaagggtctccggaagacatcctcacggacgtcgacctgataagagaatccgggctgaaacccccggagcacgtggaactactccgaaggctaggaatcgagaatccaccgctcgacataagcgaggcggaggagcttctggtggccatgctgggggaggagagccgtggaaacccgtaagctacggcaccccgaggtcgacctggagggtgaggtggtcctgttacctgtcgggagcaccgagcaacacggtctacacttacccttgggcaccgatcacctcatcgcggaggcgctctgccgggaggtgtcgaagcggaccggagcaccctggtacccggcgataccctacggtgtatcgcgccaccacatggggttcccgggtacggtgtcgttgagaacgaagaccatggtcgcactgctcacggacgtacacaggtcgttcctacatcacggggccgcggccaccttagccgtcaacggacacggaggaaacgaagccgcgttaggcaccgtcgccgaggaggaagaacggtttcattggatcagttggtggaagttagccccgatcgacgagctcgagaccgactggggaggtcatgcggacgagctggagacctcggtgatgctgtacttgcacccggagctggtaggagaggagcgtaaagtcgacgggagaccgacgaagccttgggagttcccggactatcacgagatctcggaaaccggaacgaagggagacccacgtcccgccacggcggacaaggggaagagaatcttcaagaccgtcgtcgagcggctggtggatattgtggaggaactaagggaaatgtacgggtgatttggcccgacctcacgttggggactgcgcggatcaccggaaccacttcaggcacccataatgtccgagcggtacgcgaccgtctctgggccggcctgatgctgtgcactaaccgacgtcccgtgatcgcactggcttatgtggaggcgctgaaggtgctgtaatgaatcgaagacgccgaaagatatcgcggaggagttccgatgattaggagtctcaggacgctcaagcgggccgtggtcgtgaacccgttgaacccgcaatccctacgtgttctggctgtggaggtcgcaagtgacgtcgtcactgcaatggcgttctccgtaaggttctcgctactgtggattcagtgcgctcctcatggacgggatgacgctgtcgaaggagcggccggttatggggagagtctcaagggccgttactggtagccgccgtccatctcgctctcacggcatcgttatcgggcaaataacgtttcccgcgtggcgctaagcgagccgctgggatacccgctcgtagagttcttggacgcgttcctgagcctcctcgtctagcttcaactccgcgagttttttcgtccgttcccacccggggtacttcgacgtgccgagcctgcgagaccttcggagggtgtacaccacgacctccaccgtaccgtcctcgccctcctcggtgacgacctcgtaccgacctccggtgtgcacgatcccttgcatctgcttgataacggccgccacgtcgtccggtagctcctccagttcctccttccgggcgtacttagcgagcacgtcgaacgcttcctccaaccctcttccacccccgctggagcgaagcttaggggttcaaaagatgagcggtgtaatgggtatcgatgaagccggacgtggacccgtgttcggccctatggtcgtggccggtgtactggctccgaagcgggagctcggcctaggcgcgagagattcgaaggaactcacacggagtgcgcgtcgtagactgatccgcgcgttgatgtcggacgagcgattaagggtggacctgaggatagtgtggccgtgggagatagacgaagagggcgtggcgaaggcggagttcgaagctatcagggagctagtacgccgtgctatgcccgacgaggtaatcctggacaaaccgggaaactactcacccgagcgactgcgaagggagctcgacttgcccgaaggaatcaacctaatcgctgaagagagggcggacgcgaagtacgaagtagtttcagcggcctcgatcgtagccaagacgtaccgtgactggatagtaaggctcctggagctggaatacggagaggtcgggtcggggtacccttcggacccccgtaccgtagatcgccttcgtcgggaactacgtcggggtggtgagttgctgaagtacttcagacggtcgtgggagacgtacaagcgcgttgagagtgaagtgaagcagcgaaagctcgaggacttcttctgagcgcgcggaggggggttaagactgcgaatagcaggcctgagacccgtgagctgctccgatggcttacccggtgaagtgtgtgcggtcctttggactcaaggatgtccgctacgatgtccatggtgccacaacccggagacccgcgatccgaacgggggaaagaaggccgatgtcgagaccatcttacgggacgtggagaagtacgccgtttacctggacgcactgatagtgagcggaggagaaccactcctgcagccgtgcgaggagctgaaagcgctggcacgtggtgctcggggcttgggtctcaaggtcgtcttggatacctccgggttccccccggatcgcctcgggaaggtcatctcgagcttcgacagggtagcgctggacctgaaagcgcctctacgcgatgacgagtacatggaagcgactggcggcggcatgacggcttcggacttcctgaaagcggcccggatagcacgccggcgatgtgacctggaactgcggatcacggtgcatccgtggcttgacgacgtgccgagggtcgtggaggcagtccggaaggcgtcccccgacgtggtggtcgttcagcgatacgtcggggacaaggaggtcgggatcgaccccgaagaactcgccgagaagctccgagagagttgtgagaatgtcgtggtacgggtgtgattatgtttgaacgttgcattcgaagttaaggatcgggacgtggcgggcaggctcgggcgtctcgaggtcaatggcaggagactgaagacgcccgccctgttgcccgtggttaaccccaacaaacccaccttggatccacgggagatctccaagctaggtttcgacggggtgatcacgaacgcctacattatccggaagcacgagcacctacgcgagcaggcgctcgaggaaggcgtccatgggctccttgggttcgacgggttcgtgatgacggattccggctcgttccagctggcggagtacggcgatgtcgaagtatccaacgaagagatcgtgcggttccaagcgaagatcgggtcagatgtgggcactatcctcgacgtgccgacgccacccgacgctccgaggtccagggtcgaacgtgacctcgagaccacactgaaaagggctcgcgaagcggtggagctcgacgaacaccctccgttagctctcaccgtccaagggtccacgtacgaggaccttcggagactgtgcgcagagaaactggcggagctgccggcggcggtgtatcccgtgggaggcgtcgtaccgctgctggaggagtaccggttcgtagacgtggtacgagtggtcctagccgcgaagtcctcgctgcctccacatcgccctgtacacctcttcggttgcgggcatccgctggcgattccactcgccgtcgcgatggggtgcgatctgttcgactccgcatcttacgctatctacgccagatcggaccggtacatgtccatcctaggtactctgaagttagaggagctggagaccttcccgtgttcctgcccagcgtgtacacgacacgatccggacgacgtccgcgagatggagccgcgagaacgtacccgagtgttggctacgcataacctctacgagttgcgcagggtgatagagaccacgaggcaggctatagtgtcgggagagctatgggagttggccgaatcggtatgccgagcacatccgcgtgcttgggcagggatggtggagttagcgcgacgtggaggagaactggaacgatggtgtccggccgtaaagcgtagcgtgttcgtatgcgatgaggtctcgaagggacgtcccgagctacgtctctaccgtcgacggctccgggacaggttcggcgagctctcggggcgtaaagtggtgaaagggataagcagaccctacgcagagatcgtcgagtggttagaaccatgggagctggcgttcgccgacgagtggttaggagtggtacccggagaactgtcatggtcgtacccttgccactgcctcgtggagcctagcggggatgatgagggtgaggaccgacggaggggtgaagagggtcgcaggcgctgagttcgtcctttataaggaagggggatcggagttttacgtgccggacccggaacgttactctcaggatggccttcccacccgtgatgcaccggtagcgttcgcaccgaacgccgccgtgaacaggtccgtactcgtcctgttccaccgagtacgtcctgtgaggaggttcggagacgtgttctgtggtgtcggcgccagggccatccgccttcatattgaagccgaggtggagtggtccgtactatccgatgtgaaccccattgcgtgtcaaatcgcaatgatcaacgtccggagactcggactaccatcggaggttaggtgtatggatgccgtcgccgcactttctaccttcgacttcgatgccgtcgacttggacgtgttcgggaccccgataccgttcgcccaagccgcgtttcggtgcgtacgcgacggttacgtgcacgtcaccgccacagacctcgaatcgctgtataccccggcggcccgccgcaaatatctcctcgagggaccgctccctcggcgggacacggatctagaggtccgggctgtggtaggagccttagcgcgcttagcggcttcagttgacatcgggatcgagccgatgtactgcctcgtcgagcccggggttaggattcgggtgggattggagtgccgtaggggccggtccagagcgaacgaaactttggatatgctagactacgtcgacggggtaggaccggtctggggaggtgatcttcacgacgaagacgtcgtcgaggagatgttggaagagctcgactgtacgggttggagcgaaaaacacgcccgggacgtccggaagtccctagaggtaacattttgagtattcgaggcggatagtcggcgggtgtctcgagttgaacgaggtgatcagggaggtggagaaagtccgagaagctcgaattgcacggacgctggccacccagcatcctgacgcgacgaagttcgtgagggtgcaggaggagcctgaggaggccgtggagtgtctggtcgagctcggcgcggaggaatacatggtggatttcgagggcaagctgacgccgtacctgcagcccattcaggtcctcatggaactgtacgacgccggcgttcgggtgggagaggaacgtttcgtgatcgtcagggtacctagtgcgacgaaggagaacgtactacgccaagtccaggccctgctgggtgtaatggaagccaactcggagttgcttaaggaggacccagacgcccgcgggatcttcgaggtagtacatcccatgacgtcctcgcccgaagagctcgtggaaacagtggacaggatctcatacgcgcgcaggttcgcgtcccgtgagctagacgtaccacttaaggcgggaaacctccggatcatcccacttatcgaggaagttcccgaactcctagacattcgcaacattctaacgggctacgtggaagggatgcgtgaaatcgggatggacgtcagctacctcagggtgttcatcggacgctccgaccccgcgctatcctacgggcatcttccggcggtcctcgcctgcaagctggccattttcgaagtgtatgagctgtcggacgaactaggtgtcccgatggcgcctatcttaggaggcgggtgcctgccgttccgcggccatattaggccgggaatggaagaagagttcgtagaggagtacgcgggcaccgccacgtacaccgtacaatccggattccggtacgatcacgaccgggaaaaggccgttgcgtccatccgccgcattaacgagctcgccgcgaacgacccactccaactttccggggacgacatcgagtacctcgtcttagccaccgcgatcttcatgaagcactacctcagcgtgttcttccgttgcataggtacgctgaacatcgtcgccgacatgatccccaatacaagggaccgattggcacgtaaggggcccgtagggtacgcgcgggacattcccgaacctgaccgtgtcggagcacagtgtaaggaccttggagatgtgggtcgtgagttataccgcgaactgcgccgaatgagggtcgagaagctgcccgagctgccacgcgcgatcaaattcacgggagcctgctacaccgtcgggatgccaccggagctcatcggaaccggaaggggactcgcggagatcgaggagcggctaggtgaagatgcgttggacgctgtgatctcacgattgtaccccatgctacgcgaggatctgcagttcgcagtggagtacaccttcctcgaaacggccggatccgtcctaccgtcgtccggagtagcgatggtcaacaccgacctggagtactgcgtcgagtacctcgacctggaacccccatccgacttcgagtaccagaacctggtacacacgttggaaccgtacctcaggtacgtggtctcggagggtggtgtagaggaagtcaacccgttcgtgagggatctcctcctcgagatgggccgaatgcgtggatcactcggatgacggggacggattcaagtgcacggcctcgaagatttccttgactagttcagggcccacaccgagggccacgcaatggtggttcccccgcggctcgaactcctcctccactaacaatctagcttgaacgcgacactggtcgtcgcgccatcgggtctctacaacggaagctccgacggcgtacgggtaccgagccaacacgcactcaccggtcggtaggacacctttcacggcgtgtggtgcgccggtttccatgtgatctactatttcgagttctctaagcaactccaacgggcaggcacagtgggcgagacgcgtcccgtagcgatccagctcgatcacgtttccgatgaagggacggatacgcgcgggcgttagcagggtcgtgaccagggcggcgggatcgccctcgcaacagtaaggcacgtccagcgcggagaagtacagacagggaacccgcaccgaactcctcgtagagggagaagcagtcccccgtgatcgcgttggctccgtattgtgagagcacggcatgcaatttaccggccaagtccaggaagttacggttcaactccgacggatcgataccgtgggcacggagcttctcctcgaaggatccgtccggatcgaccgatttcacgtcctcgaggtctacctcgaccgtctggaggtacgggaggtcggaggggtcgggacctctgatccagctacatttccctccaacgaccaggatacgggttcccacgagacgcttgaaggcacgtattgcctcctccgcacggccgacgtgaagcgtcgatacgccgacctcgagtgcggccgctagggagttgtaggagtgccagtggaggaggagcaccgccgaggaccgctcgaggagcgcctctatcgtgtcctccgtaccgccggtggctaccagcgccacggtaggtgagtcggggacgtcctcggggtcggtaacgatcctgggttcgaggttgaacctatcagcgagccgttcggctcgtcgcagtacatctcgatcggctaaaggggaggccaggatcgtgagtttcaaggccccatccccttggccctgcggtactcgttgagggtcaccagcgtgagctcttccgggtcggtaatgtggtgcgagcggccgcctgagattccggcgatgtgttcgatcaaccgaataccttcctcgggcagtttaatcccgatcgtagagatcgtcactcccattcggctcgctgcggtagcttcggatagtgccttcgtctccggatcgggctcccctttggtgggtaccccgtccgtcagtaggatcatgtgccaatcccgatctggtcttccacagcgtctgaaaagctcagtgcctacgcggatcgcatcgccgatgtccgtggcaccaccgggcttcagcgacatcaccttggtgatgatctcctccacatccgacgtgatgtccacaacgatctccgccttagtgttgaaccctacgatacctactcggtcccccgccttcacgctgaagtgagcgagagctatcgcggcgcgcttagcagcgtcgatgcggtctcccgacatgctaccggaggtgtctatgacgtacacgatatcgagacatacctcctcctccctgtcgaacgagcgcagatcttcgggaaggatctcgcgacgtccgcggcgaacggcggtccggagtgatccacgtacgtcgagattcgcgtagggatctccacgacggtactctcgggagtagctcctactcccagtgcctcgctcactcagacgtttagccgcatgatgtccaaactcggtgccttcgaaggcttcgagctcctcgatcagcgcggaaaacgccgcgagttctctaccttttagtgtcaggctcacgcctccttggtaagatgggcgcacgaaccctagtttttgaaggatctccagtctcctctggatttcctcctctagctcgtctatgagcgagtaatcgtgctgctgtgaggcgatttcgtcgtaggaccaccccgtaatttcctcgatgaacctccgaccatatttccccttgacgtatgccgcactggtaaccagggactccgccagctgatcgggtcggatgtactctataccccggttgagcagttggcggaggacgcgggccgcgaagacgtactccggctccccttcgacgtatttgcgctggtcctccttcgtgagggctcggaatcgcaacctcctgtggtactcatcatccagaacctcaccatccgcggctgaatcggtggctgaggtcttttgactctcactcctcgaaaccgtacgagaatccgaccgacttcgcttttcgcttccaagcctcgccccgtccggatgttcctgagtacgcctcggcctccaccggcgacttctccgacgtccctcaggggcgccagtcgacgccccctcatcgggtttcgactttcccgggatcccgtccgtgtccggcacttcggtcttcccgtatccctcgagcacctcctggatgatctctttgatgacgtcctcctccgatttaacgtgttggaccctcggactcaacttgatgcgcttgcggaggaccgaaggagcgacctcgatgacgtcctgcagctcgaccttcgatctcccttgcaacgccgcatgagtttgcgcccgctcgtataaaccgatggtggcgcggacgctggcgggcctctcgatgtcgtcgtggtctcgagtggctcgaaccaggtcgactatgaactcgaggacgtactccgggaccttcactccgaagtcttctccccgttcgacgacgatgcgtttctcggtctccttggatttgggatacgtcatcttcacggtatcaaagcgatctaggagaacctcggagagttcctcggttcccgcgtattcgtgtgggttcatggtggcgatcatgacgaagttggcggggtagtcaacttcgtaacccgcgatcgtagcacgctgctcctctaagacttggagcagcgcgttctggagcttctcgggacatcggttgatctcgtcgaagaacactacgccacggttgcctcggagcagcttccctggagtgaaagcccgagggtcggtcggtccgtactcgagggccgcgatgggatctatgtctccgagcagatcctccggagtgaggtcaggactcccctgaatccgtacgaaccgctcacaccctggaatggtctccgtctcgagctcgtcctcgtcgcgagctcggcacaagggacataccggctccttcggatgacagtggaagggacaccccttcacaacctcagcgggaggtaggaggtccgcgacggcgcgagcgagggtcgtcttgccgatgccgggcggaccctcgatgagcacgtgccgtccggcgatgagcgcggagagaacctggatcttgacctctctctgcccgagaatctgagggaggggatcctcgcctttaccgagcttctccaggactacctcgcgcagttcctcatacacttccctgacagtcaagcctgttcccctccgtacgggcagaaacgacggacgaagcacaactcgcactggggttttcgaggacggcatatctcgcgtccgaattgtatgagtgcgaggtgcgctttaccgcgttcgccctcgggaaccatctcgtgtacagcctcctggacctcgaagtactccttcgagtcggtcagaccgagcctcctcgaaacccgagctacgtgggtatcgaccggacagacgtcatgaccacccgcgaacagcaacaccacgtcggctgtcttcggaccgacccctggcagacgcattaactcccgtcgcgcttcttccgtaggcttctgaacgatctcctcgagatccaatccgtccgcgagaatacgttcacagcactccttgatcattttggccttctgacggtagagcccggcgtcgcggagcgtctcgacgagatccttcagattcacttctgcgacgtctttcggagtcttgaatttccgcaggaacctttccgccactctgtccgtcacgtcgtccctggtccgttgagatatgatggcttgaatgagggcccggaaaggatcacgccgtaccttcagctttttcatgatggggtgatcctcgtagtgctttacgatctccatcacgggattcacgcgtctccccggccctactcccggcgaaatccttaaactcggtaccgaggggaacatcctgaagcccggtaccgaaaggccgccgccaccggggtggtccccgggccggacttcagatccggcgcgccccgagtggggcgcggggttcaattccccgcggcggccgcggtcgttcgttataacccccataacgttatcctaggctggaggtagcgccgacttcacgtgttccacgattctccgaacgcgggactcgtcgtctctcgtctccggacgcacgtacaccctaacggtgggtatctcggagagcgtgcgctccttcagcgtcgccacgatgtcggaaacctcggatagcgggacatcaccattacgcgtcctcacgatcacctcgtcggaagagggatcgtaaggaaccaccttcgaggaatccaacagcactccgaaggattctcccaggtgttcctcggaggtctccacggctaccttgaagagctcaccatgtctcggttccacggccgcctggtactcggccacacacttgtacaagcgccggttcttcaggacctccacgaattcacggctctcggggttctcctccaacgcgcgtagtagggcggagtcgtccatgctttgaaacgcggatagtgcgtcttcgcttcgactcagccgatccgggtcgaatatacggaggtccaggtcgccgtcctcggcggcaacgtgcatcgcccagagtaacatcgcgtcgccggcacggcatgtcttgtggaaatacaccgccctgtacatgtggtagcgggatatcagcacggactccgccgcttccaaccccttctcatgtacgaccacgggatcacccaactccagggtgtgcaggagcctgtcgagttcgatgcggccgtactccacgctggcgtgaagggaatcacgcatgaggtagtccaggcggtctacaccgaggttcccggcgatcacggagtggagtacgccagtccatccatcgccgggtccgaacgccacttccaaggtaacctcgacgtccatggcgtcggccctctccagcacgaccttagctacggcacgaccgatgtcctcgtgatcgaccccgagctcctcctccaacagcggttccgggacatgcgaaaagggcggatgccccacatcatgcaacagaccggccagccctagcacctcctcgatgtaggatctcgagaacttaccgacgtccggcacgttacgcttgagctcttcccagtgaatctccatcacgcggtcacacaggtacttcacgcccaagctatgttcgagcctcgtgtgggtggcgccagggtataccagctccgcgagacccaactgccggactctcctcaaccgttggacttcgggtgagtccagtacgcgctcctcagccccctgtagctcgacgaatccgtggactggtatcctgatgatccggcccatcctctttcccccgtagctctcgttcgactttctcgacggcccactggtactcctcactccaaatcgtcctcttgacgacttccagagcccttttgcaggcgtccacgtggtcctcatctaagtggattcgagtcaactccacgagcgcttccagtaaggcggactcaccccggactagagctcggggacgggggtggaggagcccccaccctacaacctgcaactccgccgtcagcggtttcccttcgtggatctccttagcttccagctcaaggtaagccctggtcccctccgcgaccttggtcccgtccccgacggtctcgatagccaactccttcgacagcgctttcaagaagcggatgggatcaggtactatacacgcggtgagctcttcggttcgaacgaagttctcgtaggtacgagagcccgggtacaggttcacgacgatggaatccccgcgcacgcgcagccccacaggtgctacgttttcacccgccggcccgtcggtcaccgcgagaacttcattgacggcatcccggcgcagtccgaagaactccaggggaggttcgatctccccgctcaagatcttctcggcgatccgccgtgcctcctccggagtacttacacggaacagctcgggacaggagagtaccctggcgaggtacaccgtcagggtctcatccccagatagcaagcgtaccctacccccgccgccaacagatcggccgtcgagcctgggtttataccatcctcgtgtaactcacggtcgagctcatagagggctcgggtttcggtcaccggtctgtccccagcgatccgcaggatttcctgtgcagcctcggaaactcgtaaagccaccctgaatccgtgcttcctccaaatcagcgtatccggccgcgtggcgagctcttctaggaacgttcgaaccaccgcctcgttgatgtcgtactcctcgcgcagctctatcacacggaggccgattcgaagactgcgctcgagtccgcgcacccaatcctcggctaccgcatcacggtgcgcggccgcctgcagcgcctcgtacatcgttatccccttctccagcacgtcctccggacgtgaaacgtccggagccctggatccccggatcctgcgcatcccgccggcaccggccaacctgatagcccggtacaagtagtacgcatcccgctcctcggtctccttcgccaacttcagggcctcacgccgaacgtcgctgggatccaaggaagcacgggcaagagctgaagctagcaggacgtcgaggagcaggataccaagattcgtgttcccaccggtgtgagccgacatggagtgtcgaaccgcctcgtagaggtagcgcccgagcgggacgcgctctcccctggtcgccatctccgccacttctcggagtaccggctgtgcggcgacggcgctggccaggaagtgctcgaacctggtgtcgtcgaaatccctggttctgtggacgtttccgggcttaggccaacttgagacctccagaagcgctccgagggttaagctgacggcgatacgctccggctcgttcaccaaatgacgaaccaccccactacgtagccgaggaggaaccccgccaccacgtctgacgggtagtgagcccgggaaagcactctggatatcgccacgatgatggccactacgacgaccacgatccccaaattggaggacagcttccagaacaccgggattagcgaagccactctggcggtatgggtgctggggaaagaatacccccacggagttctaccttctctctggggtcggggtctaccgacgaccaccttcaaaatctcgctggataccatggaaaggaccagcgcttcgagcacctggaaacccagcggacggtcgaacagcattaggatcagagaagaggggaataaaacccaaccactgaagatgaaaccgatgagctcgaagaccgggtggggccgtctcgggatcttctcgatcacgcgatgatcgaaccgcactacgatttcagccaccgcaccacctccggagcgaagtacgtgagtatcaaatccgccccagctctcttgatgcacgttagggactccagcacagcggtccggtaatccacgtaccccgcctcggccgccgccttgatcatcgcgtattcaccgctaacctgataggccgcgatggggtggtcgaacctccgccgagcctcgcgcaccacgtccaggtagggcatcgccggcttaatcattaagatgtccgctccctcctcggcgtctagctccagctcgcggatcgcctggcggaagcaccgaggatccatctggtaagtgctccgatccccgaactccggtgccgagtccgctgcgtcccggaacgggccgtagaacgcgctgtgatacttggccgcataagacatgatcaggacatcgtcgaaaccctcgctctcaagcgcctctctaatcaccttcacccgaccgtccatcatatcggagggggcgactatgtcggccccggcttcggcgtgggaaagagccacctccgccaagacctccagggtggggtcgttcagcaccttacccgtatcctcgtcgacgaggccgcaatgaccgtgggtagtgtactggcagagacaaacgtccgtgaccacgacaatgtcgtcgccgtactcctccttgagcgcccgcacggtcctttggactataccctcgggatccgcggcgactcgaccttcagggtccttttctctcgggatcccgaagagtatgaacgcccgtaggcccaggtccaggagttctctaactgtctcgacggcagtttccacggagtggtagcgttgaccgggcattgagggaatttcgtgggtcttcccgtcctcacgtacgaagatcgggtagattagatcgtccgggcgcacttccgtttcggcgacgagatcacggatcgcctcggacttacgatacctgcgcatgcggacggtcggatacaatccgtctctcccccacggggagtgcttcaagttgatacgcgggaggaaggagtcccgtgaaacggcgttcggtgtggtagacgtgttcaaagaggcgttcataaagtggtcggagggatgggcgcggctgaaggagttcgaccgggaagaaatgctaagcgcttattctagcttctttcggagtcgatttggggtgaattttaaggagagaaacgttgtggaacttttgaatcttatttacagaatagccgtcgagtataggaatatactcgacgtaggtgagaagactttaactggcaaattacgtacatatttcattcctgttataatggtaattatggtaaaacagttttatggaagaattaaaagaaaagaagcaatgaagtacgtacgggacgcattacagttttacaagacggcgtatgagttatcaggtagggaagaaggatttgaggaaatattggttggatccttattacctattgaagtgcgtaagggagagaaattgccgaaattcttcgaagaatcgtttaaagatagcaccattaggaaatttttagggttagaaagcgagtctggctcggtaaaatttggacttggatgtgtattcattccatcatggcaatttcgcgagctaagggctgagataaaattcggaaaagggttcggtagagacggaggttatgtagagtacgtggtgcacagagcgggaacgtttcgtgagtgtttactcatggtcccacagctgagactcgtactcgtggagaacgccgatactcccgacaagcgggtgttcttaccgttcgatatgttggagctcgtaccaccggatccggcggcgaggatgaaactggagagtctagccgttaagctcactcgcccgtcttagggccctgcacgccgctctacggtactcgtccggcagctccatgatcgcggacgtcaggacgttgatcagccgcttggtgtaagcctccgcgaagtcttggaggacgttttccggatctcccgtcttcaacctccgcagtgcgcgctcgagctcccgatccttaatttcatgcagcgacttcgcgacatcggccacgaggcgtcgctccttcagcttttcaagctcttcttccacggttgagagttcctcttcgattagcttctccaccttgggaatctctttacgccgcctctcgaggttctcccgcgcgatcactcggagatcatcgatagtgcgtacctcgacgtcttcgatgttctccactccctcttcgacgtctctgggattagcgatatcgattatcaggatcggggatcgacgatctctcttacgcaaggcttctctaacgtcgtcgacatggatcacgggatgtggggcggccgtcgctgaaaccacgacatccgaccgggcgagatgatccacgagctcgtcgaaccgtaccgcctctccgcccagatccctcgcgagctcgacggctcgctcgtaggtgcggttcgccacgagaactgctctgacgcccctatcgactagggacttagccacggtctttcccatctcaccggcgccgactacgagaacggtcttatcgtggagggatcccagctcccgctccgccagctcgacagcggcggatcctatagacaccgcaccttcactgatccgagtctcctcccgggcccgtttgcccaggttgatcgccctccggaagactatcttgagggcttcatccaacgtacccaaccgtgcggcacggtcgtacgcctttttcacctgacgtaggatttcctgctcccccaccatcatcgactccagcccacaagcgacacggaataggtgcctcacagcttccgaacctcgtttaacccaagcatcgtcgtgtatgagatccccaagctcctcggcacgatccctagcccccgaggcgtacacctcgacgcggttgcatgtctgaaggaggacacagccggagagtccgaaggactcgacgatgtccctcacagcctcatcggactcgaacctggccttctccagctcctctacttccgcctccttgtgggtgataccgacgcacaccaggtcctccatctacctccctcctcgcggttgtcggtcaacgtggtcgcacgatgttaattagcggccggttccatcgtggcaggggggagaatcccgtgtcgaagtccgaagccatggcccacctttccgtcatggaagcgacctataacgtgaagatcaagaacaaggaggaggctgccgaggcgatcgcggagaaggcgatggagttcggagtcgaacccatccacatctgcactgccctcaacacttggctggcccgcatgatgtcggagggagaaatcgaggagggtgacgaaatagagattccacgggagctcatcgaaggtatcgaggtgaagggctaacccaagatgccggcggccagctcgaaggccgtgacgattcgtgcagccaccgtccacgcgtccaggggttcgtcgtatattcgaacgacatcgtccgcacgatcgtagaactcctccgagaagtcccccttcgggaagccacccaccacgactcctatcctttccacgccggcgtccaggagcccggccatatagccgacgggttcgatcagatcgcctcgttcggaaagtaacacgttgacctcgttggcctccagcacgtcccacacgctgacatccaggacctctatcagcggctcatcggaatccggaggcgcctgaccctccttgaggacctgctccatgagcccaatgaaccgatactgatccctcggtagcctgacgtctccacggaaccatatgacgcggtcatgtctggtgtgtacgtacacgtctagggcgttctcccgggatgcgggggagtccagtacgtgaagcagcgtcacgtgaactatgtcggggcgaccccgacggtcacgctccgggagccgtttatcgcgcatggctacgtgatgcttgctcgctatgaggagacattctcccggctttttcccacgtcgtttcgcccacctcaccacgtgttgatggcccctgagcttgggcgggatgaactccagctccgactccgctagcacgaaacaaagacgcggcatgcgggggctacccccgtgacgtccctcgtcatcacggatatcgacggcacgatcacgggagatgatagagccgtccacctaaagtgcatccggtacctgcgggaactacagaaacgcgggataccggttgggatcgccaccggtaacaccctctgttactccagatcggcggcgaccctcctcggcttcgagggtccattgattgcggagaacggagggatagtcgccgtggacgacgaggagatcagcacggtgcccgaagaggacatcgagttaattcaggaggcgtaccgagagctccgtcggcgactcggtgtgaggcgtaccgaaccaccagggctccgccggaccgaggtcgctatctatcgggatgtacccatcgaggaagtcgaacgcgtgttggatgggctcggatactccggccgtatcgaggtagtggacacgggcttcgcgtatcatttgaagtccaaacgggtggacaaagggaaggggctcttagtcatctgtgagcgactcggtatcgacccggacgacgtggtggccataggagacggggacaacgatgctccactgttgaaagcggcggggctgggcgtggcacccgcgaacgccactgagaacgtcaaacggatcgcggacgtagtactcgacgccgagaacggtgagggagtcgccaccttccttcggaagctcctcgaggaggtggacgcttgaagctgtatccgttagtccgtaaagtgttgaagttgctgtcgtcggccgattccatcggtatcatggctgataccgatgcggatggcgtgtcgggcgcagccacgctctgtgaagctttcggggtagcggaggacgacgtgtggttcccctcgggaggcttctacggagtgcctaaggacgcgctccgcgacatgctagaagactacgacgtcgtcgtcaccgtggatcttacacctcctcccttcccggaggctagagacagggtcgtggtcatcgaccaccatcccacggacagccactatccgatgactgtcaatccgtacgaaatcccagccctcccaactcacacatcggcgtcggctctggtcggcatgctcgcacaccgcacgggagggctgaatcgaccgtgggtcccactgataggagcggccggggacggtatggagggaggggccgtgtacgagacgctagcctcgatgacggatccggggtatctggttccgagtaggggccggaacctcaccccgctgcaggacgcggcggctaccgtgaacgcggcgcgtcgggtgaagtacgatgtaggggccagagaagcgctgaaggtgctgatgtcggctgattccccgtacgatgtgacggaatctcacctacagcggtaccgaaagcgagtgaggaagcaccgggccatatggtcgggtgaggcggagcgcacggcgcacatcgtggaaggggtcggttacgcggagatccacaccgaagtggacgtcgaagggttggtcgcccgtgacctcgtcgatcgattgaacctcagatgctccgtggtggtcaacctcgccagaaaaccgtgcggtctttacaaggcgagcggtaggtcccaaggcttcccggtgaacgagttgatggtgaagatggcgaggtggttggaaggctccaaggccggtggacatcccaacgcggcggcgctgcatttctccgacggtgatccacgagaggcgttcaatcgggcccttgacctgctgcagccttgatgaggcctacgaacggcggcgacgggtcaccgggacgggacttgaactccggatggaactgtgtgccaacgaagtaaggatgatccggcagttcgagggcctccatgcgcccgtcgggggagtgtcccgaaaacctcagtccatggtcctccagttcgcgaacgtacgacgggttcacttcgtaacggtgtcgatgccgttccaaaacgatctcacggtcgtcgtagaggcgtctgaggagcgatccttcctcgagcaccacgggctcggcgcctaaccgcatcgtgcctcctttccgcttcactccgcgctgttccgggagcaagtccacgacgggatgatcggtgtcgggattgaactccgtgctgtgagcgtcctcgagcccgagaacgctgcgggcgtactcgaccacgacgagctggaagcccaagcagatacccaggaacggaacgtcgttctcccgggcgtatcgaaccgcctcgatcttaccttcgacacctctcttgccgaagccacctggaactagtacaccgtcggcgtctttcacctcctcccacgcttcggagtcgccggcttcgagcgcctccgagtccacccacgctacgtccacgccaaccccgacatgagccccggcgtggactaaggcctcccggatgctgatgtaggcgtccggtaggtccacgtacttacccacgaccgcgatcctgatctcgtcgtcggcttcctcgatcctggtaacgaaatccagccagtcggagtaatcgggctcgtccgcgtcgagacccagacgctcgcagatgtaatcgccgaagccctgacgctcgagcaacaacggcaccttgtacaccagatcgacgtcgtgggcgtcgattacggcctccctcgggacgttcgtatgcagggcgatcttccgtttgacgccgtcgtcgaggggacgttcacacctgcacacgatggcgtccggctggatacctagactacggagctccttgacgctatgttgggtgggcttcgtcttcagctcgtggacgtgttccaagtatgggacgtaggtcaggtggacgaacatcacgttctctcgaccttcctccagctgcaactgccgaaccgcctcgtagaagggcatcccttcaatgtcgccgacggtaccgcctatctccaccagcacgacgtccgcaccgctggccttgcccacctcgcggatccacgacttgatctcgtcggttatgtggggaatcacctggacggtctcgcccaagtagtccccacggcgctccttttcgatcacccgctggtagatcttgccagtcgtgatattgtgggctccggatagcgtgacgtccatgaaccgttcataatggcccaggtccagatccgtctcaacaccgtcctccgtgacgaacacctctccatgttgaaaagggttcatggtgcccgcgtccacgttaatgtaagggtcgatcttgaccgcggtaacttccagctctcgtgcccttaggatcctaccgatagacgccgtggtgatacctttcccgataccggacactaccccacccgtgatcacgacgaacttcacgagcgccccttcacgctccgagactcgagaaagaataaggttgcgcggtacttcccgatccgctcggaaccggacgccacccatcccgtccgcctctcgcccgaggtcgaggtgctttgacacacctaatttcggcggttctcgatgccgttacgccatcattcgaacgataagacccgaacggtgcgccgtaaaaaaggactcctccgcgaccgcgggtacagtcaggctagaatcgcaacaatgatcgtcgtactgggtttggcgcggccagtacgtttgtgagaataactctcgaacgcccggttctcggaggtgagaggcctttgtactccatgcgagtggtgatcgaggaaaccgacgtgaccatacgggcggactcgaaggagtccgtatcatcggcggcaaaggccgtgaaattgcatcgttccgaactcgaccggtacgtcgccaaggatcctgctttcgtgacggccaaagtaccggtgagaacgcttgagggcgcccccgaggtcgcgaagctgatgtcaagagctgcggaaccgttcggagtgggtccgatggcggcggtagcgggagccatcgcggagttagcggcccgagcctcggagccgacggtgatcgtagacaacgggggcgatgtacaggtcagggccaggagatccgtagtcgtcggcctgtacgtctcggacgaccatcctctctccggtagaattgggttcgagatcgaaggagtgctcggagtctgcaccagctccggcaagttcggccactcttacagcgccgggaaggcagacgccgtcacggtattcgcggagcgagcttcgctcgcggatgctgccgccacggccatctgcaaccttacttccggtgacgacccggaggccgcggtacagcgcgccctcgagttcgccgacgacttcaccggggacttgatcgaagccgccgtcgttattcgaggggacttcgtcgggatttccggccgtccacccaagatcgtgtcgctgagaggtggccggattaaaccagcacgcctcgaaccgactatctagcgctacttcgtgcggaagaaccgggcgaactctggatacccggctttccttaccctctcctgcaaagcctccaggaactctacgagaccttctcccgtcttggccgagatcgggaacaaggtgtcgagccactggcgccacggggggaagaggcctaacgcctcggcgacggcgtccatgtgttcctcgaactcgatcggtttgatcttgtcgatcttgttcgccgcaactatggggtccaatcctacctcgttcaggaactggaacatctcacggtcgatgggtatttcgcccctccgctcccagcgttccgctatctccggaagagccttggcgtccaccacgtggatcgcgaacaggatattatccttttcttccaggtagcgaacgatgagatccttaacgcgctcttgatacctcctgggaaccccgctcatgaacccgaatccgggcatgtcgactagaacgagctcgccgtctagctcgtgaaagacgggtttacgggtgacgccgggacgcttacctactcggacgtcggcggcccctctggttatcgccctgattaagctggacttacccacgttcgagcgacctacgagcacgatttcgggcagatcccgctcttcgagcgggtcctccggcacgtaactgtgaaccgccaagacgcccttacaccgccgccatcgtgtgggcgattatcagcagcacggccaccgcgaagcacgcgtagagtatgtaatcagggtctatcttgatcccgggcgcttcctcgtcccagaagcttaggatacccgcacgtgccggtggcatctcggccctcttcttctccatcttcttacccaaacccgccacccccaacaccgtacgatcgtgccatctaaatacgcttgcacccgcgggttcggggacgactttctgattttcgcgccgcaagagggggtcagacgggtgtcgataacccctctcatcgctcggaagctcgacggtgcgctgatattcgggatcgcagagttggcgggcaaatcctgaaaggtagtccgtgaaaaggtgtaccgtgataccgccgcgtttctggtcgaggggctcgatgaatatctcgaggatatggagccttccgacgtcgccgaagccgtgctcaaggcttacttcgaggacgtagagcgggtcgaagaagacgacacgataatcttcgagtgcagaactagctttccgatgctccgttttatacatgattacgccgaggagcaccccgagttcgaaaagtacgtgaagccggagggggatatagagaaaaggagtgaagtgctggaaggggaaaattagaccggatgttccgatcgatcggtggacatcctgcggtagtactgttccaatatctcatgaagaacttaggcgagccgtatcgaatgatcatagagcgcgtggaccgaagggaacgtccattcaaggtacgagtagtcgtagaacccgagtgaaataacgtcttcacacggtaggatcatcccactcagacatcctatccgttacttcctcagcttccttgactatccgagaggctcgccgtaaatccccctctgccaacgcttccaacgctctatacaagtacgaagtttcaatagcagccagagcgcgccgtacctcgttacgcgcgtatttttcagcagctcctgcgaaccctttcagggataatcgagaacctaatttcattccgcgaaggtaccattccgcacggacttttcgggcatgaggtacgccgggaacttccttctccggcttgattacgagtccctcaagctcctcttcttcaacccggttcataagttcacgtgccacttgctctgcctctccgagatcacataaggtgctgggaacgggctttattcgatcaccatcgatcatatcagccaacagctcatattgccgtattttaggtttttgaatagtgatttcaccgtcatacatatccagttcgtatacgtagtatacgggttccgagtcctcaggctcgtacgcggcgagatcgtccagaacgcttagaatatcccgaagtatttcaacggcatcctccggcacgtagtccttgtcgtgggcgatagccgtgagtcgttcgatctcttcgtgtaacctctggaactcatcgtcgtcggccagtttaacatcgggcagtctgcgctggatggtgtagagcgttctcacgtggcggcggaccttagacagcctatcgaaaagctttccaagccaggctcgcggaacccgcttgcggcgggggttcaaggtgtatctagacatgagccggacgtggtaatctatgtagtcgagcgtctcgttccacagttcgaacaccgaggttccgaagagggacaacggcaacagctcgccctcgacgatcgtgagggagtgctccgacggatcgagcactgattggacgtactcctcgacctcctccactcggacccagcttctggtatgggctattacgggttcgccgagttcgctttcgagcacgcggccgagcactacccgcacgttcgtaccgtcttttttctcctctatccgaagggattcgttcgaactcacgtgctccagctccgtgatgtacagtcttacggtatgttcgacggtttcgggcagcgcggcgggcatcgtacgcgagaacgtcaagcgagccttcggtggtagcagtggccgctcgcccgaaggcgtctcgatagtttcggtatcgctcatttcgtcctccccgacagcaagtcggacggcgataattctgtgaagtccgggacgacgatcacctcgtggtcgaccccgagttcctcggccacttcgggtaactcctcctcgaggacttcgccgacgcggtcgtcctcttcgcgcactaggacgatgcgtttggcgccggacttccggatgtattcttcgagctcccttcgggcccgctcgacggatttcacgagcccctcgggtagtttttcaggcaagttagggttcaccttccgatagtcctccggcactagcggccctccggtctgcacgatcggagcgtctacgagctccctcagggctttacgctctcgcccccttaccaccaccagcacggagtccttgaacaagtcgtctaggtcgcgctccgtctcctcctcgacgccgacgagctctagaactgatcgtaaaatatcgtccaacgctctggctacctcctgagcccgctcgccgcgtagcacgtgttccggagcggactcgaccagtgcgtggtccagctccgcggctcggtgaacgatcctccggacgacctcttcgtccagccgaagctcgtcgacgtccgtgacaacccttatacgtcctgaccgctgggagacagcgtgactgaggagttcttcgagcctctcaacgcgtgtcaacgtggaccccccgatgacgagtgagctgttagccgaacgctattatggggagaggatggctggccgagggtcaccaccacccctccttcaggatgcgcaccggtctcgcccctgtgagtgagaagccgctgtgctccacctctacgagcaccggagtgccctcggagccactcccctcgactatatactctccaggaagcgtgttcgcggcgatgtcgtgaccgaccactacctcaacgctgcctccttcctggacctccctgagcacgaccccgaaggtccaggtccgatggaacttcctcctcacccaaaccgtagccgccgctactcctagggccggtaacccgaacactataaacccgggtaagactccctcaagcggcaggacgagcgctaccaccggaggtacgttcgtcagtattgcggacagtacgacggaccccaagataatgagtgtggaatgccagtacggtagccagtggatgtcctctgaaggtgagacgcggcggagccatccgagactgaaggccgtaacgaacgccgagatcacggccaaagcttcccataacattacgggcggtgctacgatttcctccaagattacgaacactacggtcgcgaggagggaaaactgcagcactaagacgggcacgtcccacggcattctaggagccgccgcgatccgcttaccgcgtatctctatatctttgaagggtacttggggcagctccggtagcagtacctgaccctctctcaccatttccataaccgtctggaacttggacgcggactcctcggccgtcctgatgagctgcgaggtgaatttagcggagcgtttcgggccctctttaagcagcttcactactatccaaggcaagttcacggtcacgtaaccgacggcggcggtgaacttccacacgaaccgtccgatccgctcgagcaccaagtcattcctccccgctgagctcatcgcggtaggcttcgagcaggcgctcctccttccctagtacttcggcggcagaggccacgttgtccgattcctcgtaaacctcggacaaccgatcacggtagttcttatcgcggagcaggtgatgatcgaggattatctggccggatctcgaggccaactttcgcaggttcttcacggccttctccagattgtccgaggagaatcggaaaccgagtaagtacgtcggtgggccactgatcagcaccaaatccgggtcgcgttctaggatccactccaacgccggtccgtacacgggaccctgaacatctgaggcgtgaacgatcacgtggtcacggtgcgttatcctcagtccgagaacgtaccctaatctcgtcccttcaggcccgtgcgggagtggctgcgagaactcgagaacggtctcgccgaactcgaacctcttaccgtcggcaaactcgtaatcgacgcctagctcatccaacccctcaatcagtgcccgagccctacccgcctggctccggttaatgttctcggtgggatgcttcatcagaatcagcttatctcggtaaagttccttcgccgtttcaaggtcgcaagcttcgtacttccggtcggtgaacggggtgtggtggtcgtagtggtagtgcgatatcgtgaccacgtccgcgctgtctgcggcacgctggatactctcgcgcacctcctcaagggcttcccactcctcctccgacggcggtaaattgtagcgtttcggagggattgacacaccaggatccaccagtacagtcacgtccggcgtttcgatcagtgtggccatcgacctcacaccgaggctttcgaacccgagcggaactaccctcacgttcccgactttcagtccggacgacacggtcaagtaccccaggggtcgtcatcccggttcgtcggcctacctcgatctcttcatcccggcctcggagtggtcgcaggatcgtcatagtgaggtcagcggttgttcgcttcttcatcggccgtgtatctcacttctacgaccggtgttatgtttctgccggacttgtcgtagaactccacacggtccggagtatacgggtacgctgcgatcgcgtggacggcccccaacctcttgaacagcatcaagtcatcctccgagggtaccggatcgccgtatggatgggagtgaaacgttccgattacgtcgcaggtgtgaacggagaggagatcgaaaatcgcaccggagtcggaggcttcgaaagggactacgatcagcgagtcgatcgtgatggtttccgcgtctatcgagccccctaacatcgcgaagaattcatcagggtgatttttatcgcttgcctcgaggagggagtccaggagtctcgcgtcgaattctacccttttcacgccggacaagccgccttccctccgcggatcttcttagcggcgaggttagcgggccgatgatatggctaataccgtaccagcctattactgcaatccccgcgaaggctaatgtgctggcgattacggtcgtacgtggtgatgggagcatccgtgcgatcctccgctgggctgctttggttggatcgtaaatcactctgaggtcggcgatctcgcggatttctcccttcaaatccgcgtactccgaaggcgggacctcgacgtcgatcgtggctgtgacgccaaccactacgaatccactggtgtacgttatccaccccgaaagctcgtcggccagctgagagactttcgaaggtgggacggacttgagatccatacggacgaccatcttggtgggcgatgagaacctaacgtctttgacgccggggaagactttgggcactttagactcgaaccacctccgacggtccgagggcacgggttcactcatggcaacttccagctctaggtatcgtccgacgggtttcccgcggtacttcttaaccgcctccaaagctttgggtaaatccgagggtgccgtgctcagctcgaccgttaggtacccgttcttctccagtccagccacgaccttggggatgtccgagagcatgggagcgagtaggaaaagtcctacaccggctccgatgatcgccgctccgagggtggttgctatcggcgccttgatccatcgcccaacgacaccgatagagtaagttaagagtgcgagtaacactgtcgtgagggtcgcgacggtcacgaatgccgcacccacgtgccatcccccggcgaggtccatgcgcaaacgtatttaaatcccgactcacccgccgcgccggagaacccatctttgggggccgacgtcacttgatcgagaaggtgttggcggatttgaaccgggttgagggagtgcatggatcgttagttgtctcgagcgacggattgatcatcgcagaggccgtgcctccggatatcgactccgagatcgtgggtgcgattgcgacgaccgtatacggttctggcgagcgagtcgtcgacgagatgaatctaggagacctcgagcaaatgctcatagaggccacgcacgggaaggtgatgatcgtagacgtgggggaggacgcgacactagtcctcgtcgtcgagcccgacgccaacttaggacttatccgcctccgcgctcgggaggccgctgaggagatcgctaagcagctttaatggtttccccgaaccaccgctagggagcctcgaccgtgattagagccgtcctcagaatttttaaaggtattttaagtgggcgagatggtgagggaagggagcggggatttaaagaggctagggagggcgccggaagttcggaggaggatggagccacggaagtcagggatgaagtgatccgacgagcactcgacgtcatcggagagcagctcgatgtggagaagctcgtcgaggaagcccgcaaagatctgacgtcggccctgaaccgggttaccgagtatttcggtctggagaaactagtcgtgttagacgattctgggaagccgattgggatagtaggagacggccggatggagggcgggttgataaacgcagtttacacgatacgtgaatcactgggcgacgttgatactattttagtaacttcggaagactcgactaactacctggcgctgtgtctagacgagtacgtagtagtgtgtgaatctaaaatgaccttgtccgacgcggatatcttcatgcttaaaaatgaccttggaaaagttatagatgccgcagtctcgggccagcgagtgaagtctgagataccgttcgtggtaatcgacgagcatggtttggtgatcctatcgaatgtagatcgatgtgaagaagttggagcattgatctcgcagctgtacaggttcgtcaaggatcatgtggagggctcgatcgaatggatcaagatgaccaccggtgaaaacaagaccctagctgtaaaaccccataacgatttcctcatagctttcgtcgtggagtcagatgtcgaggacgcggacgacgcgtgcgaggaaaccgttaaaactcttatcgaaaaggtcgagcgcgccgtagccggatctccgagccctccagccgaaaaaggcgaggggttaacctgacttggctgaggcggaacttcccgagtcagaggcgtgtcgtgtggtatgtatggcctcgggtaagggaggtacgggcaaaaccaccgtaaccgccaacttgggtactgcgttagccgagctcggtgctgaaacttacatcctggatgcggatatcgccatggctaacttgggactgatcctccgcatggaagatgccccagtaacactgcacgatgtactggcgggagaggccgacatcgaggaggccatctacgagggacctcacggtgttaaggtgatccccgcgggcatatcactggagggcattcgaaaggccaaccccgacaggctgagggacgtagtcgagcacataatagacagagcggacttcctgctgatcgatgcgccggcagggttaggtagggacgccatcacggccctctccgcgtcgacggagagcctcttagtggtcaaccccgagatagcgtcgatcaccgacgctcttaaggttaaagcggtagccgagcgggtagacacccagatcacgggagccgtcgtcaaccgtgtcacgaaggataagaccgagctgacgaaggaagaggtcgaaaaaatcctggaaactcccgtaatggtcgaagtacccgaggatccggaggtccgaagggccgccgccttcggagagccggtggtggtccgcagccccaagtccgcggccgcgcaggctttcaagaagctggccgcggagctagtgggtatcgagtacgaggtgcccgttccagacaaggagggagtgttgtctaaggtcattaagggcctgttcggacggcgttagaagcgggcttcccataacctgtccccgacgtgatggacgttgcggacggctcgacccctctcagactcttcgatttccctcgcactcattagggctatccccacggcgagaggccgccggttgcgctcgtcgatgacgactacaccgtcaccctcctcgaactcaccccgcacttccacgatacccggcaccatgatatcggccccggaagccaccggcttgacggcacccatatccactatcaccacatggccgtaattcccctcatcgagttggaggagggcatgaatcgtgggaaaccaaccctcatgtcgttcgaaggccattaccttgccgtccttgatcagcaagcgctcgatatcatcgtccttgacgtacgcgacctccacaagaccagtgagtacttcgccgagactaaccccagacgatacacgtaactcctccaaaacttcctgaaggtccttctccgagatcggatgtcgacgggaaaccttcattcgccagctcccccagccgcacgggggtcggacggtttgagaccgcacgactgtcttcgggacttcttggacgatatcgtgatagtggagctgaagacgggcaagacgttgcgaggtaggttagtgtccttcgacggacacctaaacctggtactggacgactgcgtggagatagatgaagattccgaagtcaggctcggacgtgtgttgatccgaggagacagcgtcaccttgatatcacctgccgaagtcggatgagctgccagggggagtgaggcttggcgaagggaaccccctcctttggtaagcgtaacaagacgaagacacacgtcaggtgcaggagatgcggccgtcgcgcataccacgtgcggaaaggatattgtgcagcctgtgggttcggtcgctcacggcgcatccgtcggtacagctggcagaacaagaaggtgaaccgcaagcgacgccgctaagggagccccggtaatggcacgagacggacgacggaagtcacccgtcgacgtcaggataatcgtggagggagccgccgacgccgagaccatctctaaagtgatccaacggatggcgctcggaggagagtacaacatcacagtgacgtccatcatccctactacccacgcccacatcgcacgacggaccgccgaaggtgcggacttagtgctcattgccaccgacgcggacaagcctggtcgcaaactggccaagaagttccaggaagagctacgcggcgtcgtaggtcgagtggaacgcgtgaagatgcccatcggacacgacgtggaacacgtggacctggaaatagtggagaaggagctccgcagcgccctcgtccgcgccggcctcaaaagtctcagggacattaaggagctgcgcgaggagatcaaggagcttcaagaggaaatcgaagagaaggaagagctcatcgaggaactcgaggagaaagaatcggagttggaagaactgcgcgagagactaaaggagatcgagaaggaaaaagcgctcctggaggaggaacgggacagactactggatgaagtcgagcggctcagagaccgcctcgaagagcttgaggaggagctggaatccgcggatcatctgcggatcatggacctcgagtccgtgtgtgaagaggcggagctgagcccggaggacgtagagccggaggtcctagaggagctcggagaagagctcgaaatcccgatagtggtagggtccacccgaattgcagcaccgtccagggaggacgctgtcagggtactaaagatctacaagctcgcccgaaaagtggtcgatggcgagggggaggaggaaaacgaaacgactccaggagatcctgaagtctgatgatttctttctagagaaggtggagaagctcgaggagctcgcagaaggtgaaccctgtgccctcgtcaggcgccaaaacgttgagtggataacccattttcccggtctagcgttccacgccgacttcgagtccgaagagtacacgctggttgtccaccgtatggattcgagggccgttcgggagtggccgattccggagaccgtcgaagtcatcacacacgatgaggccaaccgcctgactcccgcccgggccgtcgacgacgagtcggcggcccgcaaggtaccctgttatagggtgaagaacgttaacgaggacgttacgagggcgcgtctctccaagtcgaagagtgagctgaggttcattgaggagctagtggaagcgaccgagcggatactcgtaaaagttctcccacccgaagactcggaggccgaggtagcatccgacctcataagggaggccacgattcgcggctttcaaacggcattcgaccctatagtggcgtatgacgagggtgccggtgtaccccaccaccgaccgagtcccgaggaaaagacctggacgaaatgtgcgttggtagattacgggatcaagatggtgtactgcacggacatcacgaggaccgtagtgtccgagaacgaggcgggagacgtcctcgaagtcgtcgtgaacgccctcgaggaggcactccgagagcttcaggcgggtgtgaacccgaaggagctcgaggaagagctgagagggtggatggaagacgaagcgcccggattcgagttcccccacagcctcggccaccatgtgggagtcacggtccacgagggccgtctcatgggtcgattgccggagggagccgtgatcaccgtagagcccgggctttactcggatgagttcgggatccgcgtcgaggaaatggtggtcgtcgggaagcgaaaatgccgaacgctaaccaagcttccgcgggtgtgggagcgttgaaggaagtcctaccgggtattcgagcgctgggagatctagaagccgcggagaaagtcgtcaagaggtgctccggtggaagcacggtgatggtgtgtgtgatcggtagtaccgaaatcagccgcgttcccggtatctcagccgcgggtaaaacgccggagtcaacctttcacacacccgcaggagatgtcgagttgatatactacgacaggatcatcaacgccgaggaggtcccacagaaccccgtgggtgctccctcacccgcggtgataacgaaagccgtcgtgaacttggcgtctatccccttcttgacggtggatgccggggcagccgtgaaacccgcttgcccctacatcgacctcggaggtgaggtcgcgagggacttccgcgaagggccggcactgtcggaggaaacctacgacagactgctggagttcggtaaaacgctcggtaaggagctcacccgcgatgtggacttcctaaccgtgggggaaagcgtgccgggcgggactaccacggcgatggccgtgatgactgcgttgggttacgaaaccagtgaaaagttcgcgagcagctcccacgattctccgcacgatatcaaggagcgcgtggtgaaagaaggcctggaggcgcaaggagtagaaccgggtgacttggacgcccacgaggcgatcaggaggttcggagatcctatgatgcctgcggtggtaggcatcatctacgggtccaggacaccggtgctcttggcgggtggcacgcagatggccccaatcctagcgtatctggcggaggaaggacagttggacccggaacgggtattcgtcggaactaccaaatacgtggtcgaagacgaggactccgacatcgaaagtctgttccggcaagtgggtgactacgttctattctccgcggaccccgggttctcggagtccaagttccgtgggttcaggttgtacgaggaagggtacgtaaaggagggtgtcggtgccggtggggctcaggtagcagctgcgttgaaaacgaaaggagagatcacaccgaaagacgttctgagggagtgcgagcgggtttacgagcggtggatggataaattttaactaaataacttttctaccaaagtacgctcaaacctacgatgctctaagaagtggttattaggatcttttattaatatgtagactaagtaagggtacagaatcgggaagaaaacgactataagtatgtgaattccgaagttcctataaggtatttttctgaagaaagatatgcacatatccagttcatcagctagcaatgatgcgatagcactttccctcgcctcatgcagataaaaatcccgcataagcctgtatgcaacgtacagatacgctactccgaaggtgatggtacccaaaaatatccacaagacttcatccaaatggcccaactcctcgatatcttttactttcctgaatatggccaagtaacaggacttagagatgcactcggtgcggtacagtatctcggaaactatacggaacagttccgaggatcgctcgaagtgcttgttcctcctccggatgaggatatagaataacgccgcgttgaccgcgaggaaggccgcgaagagtaccaccgttcccacggtgagggcggttccaccggcggatactacggaggccccactggccgtcgccacgcacaccgtagcgatcacggacaccgaggccgaggcgagcgggcccaggactacgacaccgattccgagcgcggggttcaggatcatgtcagtatcttccgcgcgtttcagagcccgctccagttctcgaagccactcgtcggtggacatgcctcaccctccgccgaacctgtactctatgaaacacgggccttcctccgacaccatgcacgggcctacgggatccgtcggagtacatttcgtgccgaacaacgggcagtcccggggctcggccaaccctcgcagtatccgatcacatatgcaggattcgtcgtgtcccagggtgtaatccggccgtattccaatctcaatcgcatcgtgatctgcgaggtcctcacgcagcttcaacgccgactcggggatggtcgggaaaccccgccacggcctatcttcgggctcgaacgccctttccatcagttccttcgcgaccgggttccccctgtcctcgactgccctgaggtactcgttggtgactcccacacgtccccttctgagcatcttgaggcacgccagtaccgcgatcagaacgtcctcgggctcgaagccggcgaccacgcacgggagctcccgggctacggactcgtagggccccgtcccgatgatcgtggacacgtgaccgggacatatgaacgcgtcgagacggcactcgcccgactccagcaaccactccatcgcaggtggtatcaaccggtgagccgacagcacgtagaagttggagggcgggtcatcgaggagcacggccgcggtggtcggtgccgtagtctcgaaccctaccgccaggtagaggacatcacggtcctcggactcggcgatctcctcggccttcctaacgctctggaccaccctgacgtccccatcgcatgaggagagggatccgacaggagtggggaccctgtacacgtccccgaaagcgcacacgaccatgccatcttccgcagcctttatggccgcggcgagctctcccgtagtggtcacacacacggggcaccctggaccgcagactaaacggacgttctcgggaagcaacgatctgagaccgtgttcgactatagtccgttcatgggatccacacacgtgcatgatcgtcacatcacgatcgagggtctcggcctccttatggattcgacggacgagctttctcacgaactcccgacgtgtcattttcaagctcctcctcgatgtgtttcagaacttcttcccagatctcaagggacgctcgtgcttcctcctcatctagcttctgaatcgcgaaacccgtgtgaacgatgacccaatcgccctcctccacgtcctccagcaagctcacgtcgacctcctgtcgtacgcctccgaagtccaccacagcgcggttgccatcgagctccacgatccttccgggaatcgccaagcacacgtcgtccacaccccgctgggttgaaccgaagaacttctttcgtattttctcccgagggccagggggaagctccggtgccgtgggaggagatcgagcacacggcggatgccgcgttccgagtgtgggccgacacgcctgaggatctcctggttgaagccgccaaggcgctgttcgatctgatcacggacctggacgcggtggaacccgaggaggaggtggagatcgaggcggaaggaggagacctagtggagttactacacgactggctcgaggagatacacttccgacacgagatcgatggaatgctgttctccgacttcgaagtgaaggaactgaagaaagaggaaggatggaaggtacgtggcgtagcccgaggtgagccctacgacccggaccgacatccgttccacaccgaggtcaaggccgtgacctaccacaacatgaaggtcgagcgcgaagacggacggtgggtagccgagtacgtggtcgacttgtgaagggggcaggtcgatctttgaacctggaccgttatcggaacatcgtccgtgagacggagcggaagtacatcaatgtgaaccctatccaacgagggggcgtgctgaccccggaggctcggaaagccctcctggagttcggagatgggtacagtgtatgcgacttctgcgaggggttgctccatgagatcgagaaacctcccatccgacagtttcacgaggacttagccgagtttctcgggatggacgttgtgcggatcaccgccggtgcgaggtacgcgaaggaagccgtcatgagcgcgctgtgcgaggagggagacgtagtcgtcgcggactcgctcgcgcactacaccacgttcgtcgccgcggagaaggcgggagccacggtccgcgaggtcccgaacaccggtcacccggagtacaaggtgaaggtcgacgagtacgcccgggtcatcgacgaggttgaggacgagcggggagacccacccgcgttggcgttactcacacacgtcgatagtgagtacgggaacctcgcggatgcggagaagttcgtgaagatatgccgcaagaagggtgttccggcgctgctcaactgcgcctacaccatgggtcgcatggacctgtccaacctgagcccgaagcccgacttcatggtcggtagcggtcataagggcatggccgcgtgcgcaccgtgcggcgtactcgcgatgcgggaggaatgggaagaggaagtgctcaggggatcctcactgcgcggagacgtctccggtcgggagtggccacacaaggaggtcgaaatgctcggatgtaccgtgatgggagcgccgatcgtcactatgatggccagcttcccccacgtcgtggagcgggtgaaacgttggaaggaggaggtgcgaaagacgcggtggttcgtgaaggagatggaaaggatagagggcgtacgacaactcggtgagcgaccgaagcggcacgatctggtgaagtttgagactccgggcttccacgaggtggcggaagaccatcccaggcgcggctacttcctgtacgaggagttgaaaaagcgtggagtcatcggtatccaacccggacagaccgagaccatcaaggccagcgtatacggtctgacggacgagcaggtagagcacgtcgtgcgagcgttccacgagatcgcggaggagtacgggctagaagtctcctgagtcgttcggtcggaccgacggggatctcccgcggaagtattgagggacaggagccctagatagcgcgccggagcgtgactgtgacgtgtgcggagtgaagtcataaggtgtcaagccgccgtccccgaccgcacgcaattgttacgaatatcataactattggagggggaacctccgtgcggatggtggtgttgttctccggaggtccggattcactgctggcggcgctgatcgcctgcgatgaatacgacccggagaagatcatcctggcgacgtacgataacggcgtgctgatcggcgtggaaaaagccggcatcaactactcccaggtgaaacgtgccacggacgccgaggtagagtggaggattttcgacatccatggacccttccaccgatgggggcttcgaggtctcgaacggaggatcttacggttcggttggaacccggtgtgtctggactgcaagttctgtatgctcttccacgcactggagaagttggaacccgacgtgatcgtaacgggggacagggagtccaggaagtatccggaacagacgccggaggctaaggctttctgggaagaaatgtgcggcgagtacggctgcgagtacttcacaccgctctgggattggaagaaaagaggcgtttacgaggagctggcccgacggagggtatcggtgaggggatcggagcccaagtgcatgctggcgggctcttggaagaagccggtgagtgaggagaaagtcgaacgttacctggagggactccggaagagacttctggggttacgctctactccttgagttcctcgagcttctccgcgaggccctccagctcttcgagggcgtcctccatcttagtgcagcactccctcaggccctccacgactcgagagatggtggtggaaacttcctccatctcggacttcagtcgctccaccttctcctcctccaccctgagtttctccttgatgtcctcaacgccggtgactatctgaagctccccgctcttgagcatctcgtaggtctccaggacgagctctcccgccttagtctccccctgtaggtgcttcctgatcgtggcctcggtacgtcccagctcctcggcgatctccgatatcgtgtaccccgccttctgtctcgcgagggccgacgcggccaccgctagcgagtcgacccaagtcaggaacttctgctcgtggatcatctccagcaccttcggacggaagagcgtggccaccagcagcaccgtctccagctggtggatctcctgccgatccatgggctggaacgggatctccgtgaggtcgattacctccttcacgctctctgccatacttgatgcaccctcaatataaggagggatccggctatttaaactctaagaaacagaacctcaaggggcgacggagccttgttcgtcaagttcgattcgcacgtgcacctggatgtaagatgtgaggacgacatgaagaccatgagtctcgccggaatacggtacgtcctgacgctagcccacgatcccatgccgttccgtaccgcggaggccctcttgggacactgggaggctgtcgagtcaaccgcggagaccgcggtagattacctgatcgacgcgaaggtgggactgggggtacatccgagggccatcccggacgagggcctcgaactcgccctcgaacacctcgagtcgaagctgagtgatctggacgcggtaggagagatcgggctggaggaggccacagacgaggaggtgaaggtattccgggagcagctggacctcgccgcgaccgaagacgtacccgtcgtcgttcacactccccggagtcgtgatccgaacgtcatctcgaagatcatcgaggtcgccagggactcggatctgcaccccgacctgatcgtgatcgaccacctcaacgaacagtacgtcgacgcggtcctcgcggagggtttcaacgccgggatcaccgtgcagcccggtaaggcgaccgtcgaggaggccgtcgagatagtgaccaatcgagccgaacacgcggaccgcattcttatcaacagcgacgcgtcgagggccctgagtaacgtcttagcggtggccgaggtggcgttcgagctggaaaagaggggattcgacgccaccgaagcggtggtacgggacaacgccctacagcttttctaacccggcaccctcttaacgccgtccctccccgcccacccggggtgcgaacgtgcggctggctttcatcggagggaccggccatcaagggttcggactcgcgctgagactggcggcggcgggacaccacgtgatcataggatcgagggaggaggaacgcgccgttaaagccgcggaggaggccgaggagatcctggcagagcacgggtatgaggacgtcaccgttgaaggtcgcgagaattccgatgccgccgccgaggcggaggttgtgttcctgactgtcccgttcttcgctgtcatcgacacggtgaaggcgatccgggactccctcgacgaggacgcgatcgtcgtggacgtcacggtaccgttggaaaccgccgtaggaggcaagcccacccggctgatcagaccgtgggccggatcggcggctgaaaccgtgcagtccctggtcaacaaccccgtggtatccgcgttcgaaaacgtctccgccgagtcacttcgggacctggagaaagaggttaagtgcgacgtggtggtgtgttcggaccacgaggacgcgaagcgcaccgtcatggagctcgcggaggagataccgggagttcgggcgatagacggcggaccgttggagaacgccaggatcgtggagtccatcacggcactgctgatcagcctcaacatgcggtacggtaaggaggacgtcgggatcaggttcaccaacctgtagggggtccgcccgcgtcccgatcttcaccccatccgctcgggactttgtcttcatcccccagggggcgccgcgttgagggattttctgaggtgcgtagaggacgatttggtggtagtcaaggaggagttgtcgccggagtacgaggtgccggcggttctccaggaactcgatagaccggtggtgttcgagggcgtcgaaggctacgacatcccgctggtaggtaacctatgttgtagtcgggagtacttggtgagggcactaggagcggaatcctgggacgatgtcctgcggaaactcgcggaggctatggactcgccgaaggaaccgcggaaagaacgctccccgtcgttcctcgaagccgagcgtggacccgagttcctgaaggagtttccgatgtgtcgattttaccggactgacggtggtccctacctcacggcctccctggtcgtcgcggtcgagcccgaggaaggcatccccaacgcgtccgtgcacaggatgatgtacctcggtgacggcaagttcgcggtacgggtcgtcccccgtcatctctacagatactacgagaaggccgaccacgatctacccgtggcggtgtgcctgggagtggacccgcggacgatgttcgcgtgctgcgcccgcgtaccgtatgaagtcagcgagctggacgtcgcggcggcgttctgggaggacctccgggtgtacgaggttgactacgggatcccggtacccgcggagagcgagatcgttatggtgggtagactgacccccgagcgtgccccggaagggcccttcgtggacgtgacgcgcaccttggacgaacggcgtcgcgagcccgtcttcgaggtcgagaaggtgtacacccgggaggacccgtaccacccgataatcctcccgggcggagaggagcaccggatcatgatgggcggtcccgccgaggccacggtcctcgctcacgtctcccgggtgtcggaggtggtcaaggtcagactgactccgggcgggggaaggtggctccacgcggtggtatcgatacggaagcgcacggaaggtgaggccgtgaacgccggcctcgccgcgctggcggcccatccgagcctgaagcacgtggtggtcgtggacgaagacgtggacccggacgatccggaacaagtcgagtacgcgctcgcgacgaggttccaggcggatcgcgacctgcacgtggtgaggggtctcgggtccaccctcgacccgtcggcggaggaggggatcatggcgaaggccgtgttcgacgcgacggccccggtggagaaaagggaacggttcgaggtggtcgaggtgcccgtgagcgatcgggtccggcggatcctggacgaactaccttaggtccacggtgtgctccagctccggtcccgtggatactatcgtcacgggtaccccgacggcctcctccaccttctcgacgaacttcttcgcctcggtgggaagctcgtgccaagtctcggcttccgccgcgtccggaaacctcctgtcgatgcacgtgatcgcgacctgagtggcgccgttgatgacgcacgcgcgcttggccatctcgaagtcgaactcgccgatgcgtcgcggccgacccgtgaccgtaccgcgctcgacctccaggatctcctcgccgaacttctctatcacctcctcccgggacaactccgtcgggaacggtccttccccgacccgggttgcgtacgccttgaacaccacgtacacgtcgtcgatcctcgtcgggccgacgccgacgtcggaggcgaaggcgctcgccgtggtatccttgctggtgacataagggtagtcgatcccgtggtatagggatagaccgaacccctgcgtaccctcgatcagcacgtcctcgcccgcgtcgatagcctcgttcaccaacccgggaacgtcgccgaggaactccgaaagctcgtcgacgtcccgggccagcttcgccttccgcaacgccctgtccgcgttcgccggcccgcagccggtgccggtcgtgtcgatctcgtccgagaggtgcttggaagcgcgctcggcctcgatgtgcttgggctcgatgatcgcgcacctctcatccacgatcaggcggtcatcgacccggaagcgggacagtcgctcgacttcgtccaagagcacttcggggttgacgagaaccccgggtccgatggccagctcggcctcctcgtgtgggaagccgcacgggatctgccggaggccgtaatcctccccattcacgcgcacggtgtggccggcgttgggaccgacaccggcccgcgctatgacctccggctcgtcctggaccgcgaggtacgccacgatcttgcccttgccctcgtcgccccactgaccaccagcaacgacgctaacgtgaccgcgatcccgcaaaccgatacccccggaaccttccgccaggaggccggcggagagggctgtggcgtgacgagctccagcgtgaccgtgacatggtacttatcggattcgttcaatggtagtacgtacgcgttcctgatcccggacgggtgtatcaggatcccgctgactgagtaccggttcggacccaggcgcttggccacgaagttgagcccatcggcgagcaccgtcgagtaggggtccttcggtatcttcgtcagtccggtcacgaacgccggaaagatcagcggaacgagcctgtacttatctgcgggtaccaggaacgcgcggggcagcttaacgttcaggtccttcccctccgggaggttcgggagcgggtactcgaacggtccctcgaaccgatagaacgggtcgcccacgagtaagtaacccggactaacgtcgacgtagcctcggagctgctccagctcccagcacgcccataccacggcccgccccagttcgacgccggaggccgcgaagaggtacgccatgatggcgcccgccggatcccggaaggcgatgaccgcgcggaacttgggaaaaccgttaggggtcgcgtacacgtctactctctgcgcgatcgagttgggatcggcgcagatgaacaggaaggaattgcactctgagttgagtgactggaggaagttctgtcccagcgcttctttgaacacgacgatcccggccgcgaacttctggttcttcaggttgagggaattaacatcaggaactgacagccacttgacggttaccgagtgctggatgtcaccgtagtaagccgataatgacccggtgggatcgaagactaccaacggagatgcctcaccgtggagatgcatcgagaccagcatcctgttggccgccaagaaccccgggagaccgtggaacgggaaacatgctacacctacgtcgaacttcggactacctagtagcaccgatccgaaggacaccacgtactcgacgtcgtcgagacctttcagctccttaccgtacgcggagagaaacctatcccgcacgtcctgtttcagcgtgtcgacgttcagtgatccacccaccgtgacgaacgctaccaacgccggtctcatgcaggcgaactgtacggcggccagggtgatcgggtcgaacggttgggacttgtagggaccttccggtttcgcgagcggttggacgacggcgagggccctgatcgacaagtcgctgaagtcgtactccgggttccggaggtactcgtccagcgtgagcaccgggacgtcgaaatgtgtcatgtacgtcagggggttaccccagacgacggcgccctgctgcttcgccactatgggcgccagctccagcccggggatgaagcccgcatcggagtctaaacagaggaggaacttcactgggaccccggagttcatcgccacttccacgagccggacgcaggccgcctcaaggtcgtccggaagccgctcccagcccgggtgggtggcgggatacttgtacgtgagcacgacgctggacggcccgacttcggacatgaggttctgcgtgagtttgtcaagcttaccctggaccgctatcgggatgaccgaggcggcgttaccgccggcccactcccgatccagcgacgccgccgtgacgaagaccctcatccaatggtatttggtgtgtacctgatccgggacgttcaccacgacgtagacgtgggcgttcactggaacgatcagcgcgaggagcgccgcgacagtaacagcggtactatcgacaaggcgacccatggggtcaccacccaccgtttagcgttgttcggactgacgtcgggacctgtgtccgtacggagcggttccagggtcaggatcgcgtagacgtcgctcgactgcgccaacatgaacgggacgtcgggtaccgggctgtcccctcgacccatgatcacggtgtaatggcggttcggagcgtccgcgtcgaactgaatcctggcctcggtctcccaggagcgtatcgggtacccgaagaacaccgtgaacctgtagtccctgttggaaagcacgttgttgatgtctcccaggatcaggcccttggccagcgcgaagacgccctcgagccctacggccaccgcctccacgtcgtacagttggtccgggatcctattgaactccaagtatctgttccaagcccactcgcagaagccggacgccagggcataccacgtgagtatcaggggacgacctttaggaccctcgaacaccaccgcgtacggccccaccaacccccagcccagctcctggtcgttcccctccgggatccggttgtacgtcaccacgaggtagtccttgaggtcgaacagcagggtgctggtagtcagatccaccccgatcaggtcccaggggtagtgccccaggcacgggagcgcggcgtagaagttgggtgtgcccacctggatcgagttgttccaggggtcggtcagcgtcatgtaggacaggaagatgtgtgggttcgcccccaggatctcggggagcacttcgtcgaactccgatgttatatcccagtacatcccactttccgccggtgaagggaccaagatgacgccctcccagctgtaacccgtcaggcgcaggtcctcggccgcccaggcgatcggcaacccgtagagggcgcccaagtacagcgagctgggccagggctcgaacgtttgagccaccctccacgactccgctcgccgtggaacgttgaagatcacggcgggagctccggcggtgatgtccgccgaagcccggacgtaaatcgcgtcgtcgccgaagaccagcctggcctcctccctgaacgcctcggtcttatacacgaccacgatgagatcggagttcacgcacagccgatagaacggatcgttctcaacgccctgccacgtgaagggactggcggggttaatcacgtgcgcgccgggaaccaggggtatcagtacgtccttggtctccgtgggggagatgaccgtggctctcgccatgagcgcgatcaccacaccgaccttctccgggtgctccgcagcctcgggcagccgacgacggaggtcctctacagccttccatttgagcgccagggcggacgagatggcgagtgagtcgtactcggagactatcagcacgagatggctgtaacctagggccgtgaacagctccagtggatccggggtcccggacgacaggtccacctcgatccgcggcgaggagggcagcacctcgttgatcacgtggtcggcgatgcccataacgcctaactgagatccacgcgtgaccgccgggaacacgtggattctaccgtcggcgtcctcgtaggacaggagcgagaagtagggtacccagtacgcgcatgccgggaacttgtaccccccgtagttgccggagtccccgggcgggacgcggtacccggggttgtccccggctcctttctccacgacttgaccgttggcgtccggtaccttgaacaccacgaggtgcgattcgtcgaggaccaccgtgggcgccgcggaggtggaacctataagggtaattaagagcgcgagcgccgggatccacggacccctcaaccgcccaccccgcggggaggaacgatgctgagggaagcggtaaaagacatcgaatcgggtcacgtcgacccgtcggagcggatccatgagtatctcgaaaagatcgaccgagagaacccggatataaatgcattgatctatatcaatgggggagcgccggaggaggtcggatcggaggggccgctcgctggagtcgccatagccgtcaaggccaacatcaacgtggaggggatgccgtgcgactgcgcgtccaagacgctggaggggtaccgggctcccttcgacgcgacggtcgtgcggaggatcaaggaagcgggcgccgcggtgatcggtatcgcgaacatggacgagttcgcggccggctcctcgggcgagacctcgtgccacggacctaccgataacccgaggtgtccggggcgcatcccgggcgggtcgagctcggggagcgccgcggccgtcgcggcgggcctctgcgacgcggccctgggctcggacacgggcgggtcgatccggaacccggcgtcacactgcggtgtggtcgggttcaagcccacgtacggcctggtcccgcggcagggtctcatcgacctggccatgagtctggatcagatcggacccatcaccaggaccgtcgaggacgccgcgctgctgctggaggtgatcgcgggcccgggtgaggacgtcgaagggaccgtgcggaacgccgaggtcccccggttctcggagctgctggacccggaggaagtggaaggtatgcgcataggtctcgtgagggagttcctcgaggtctcggagcccgagatcgcggaggtcgccaaggaggcggctcgtgccctggagcgggccggggccaccgtcgaggaggtgagcctgggtcggaagctcgtcgacgtggcactacccacgtactacgtgatcaactacgtggagttcttctcggcgacgcgccggttcgacggacggaggtacggtcgtaggatcgagcacgtctgcggaaaggaagttctccggaggatcgtggccggggccgcgatcagccggcaggaggtccgcggtcagtactacgagcgggcgctgagagccaggacgtggatccgacgcagactgttggaggcgttggagggctacgacgcgttgctgggaccgacggtgccgaagcctccacatcgtatcggagaggagttgagcgtccgtgagatgtacgggtacgacgtgctgaccgtgatccctaacctggccgggtgtccggccggaagcgtgccgttcgacacgattaacgtggatggcgaccgggtgccgtgcggtgttcaggtgatcgcgcggccgtgggaggatctgaccgccctgaacgtcatggcggccctcgagcgggccgcctccttcgagccctgagactccatgctcgagttcttcccttgacagctccgacctctgtccctattcgggaccggcagtcggactgttcacgcatagcttatgcatgattcacgtacgattgttgaaagacggtgtgataccttacggacggtagttcaatagtcgtcatgtcattcacgcacgtacaacatacgacttatgcataacttacgtacagaacgttgacgtcactcataacttcggagtgtgtcacgtggttcgcctcatagccatttgtgcgactttattatgcatccgcgccacggctcggtcggtaccgacgctatttgtgcgtctgttttggggaggggtctcggcagatcgtcgtgggccgcctaccgccggagggcgatatcatgttcgcacaaaattggggagccgcagaagggcgagcgcggccgcacgatctacctaaggcagaaaaactcagtacaactcctccaagaatggctcgaaacaatccgactcgcggcaccacgactctgcgaccgggagaaagtcaaacggttcggcgggccgtccggagggcgctgacacctactcgaacggctctcgcagggaataccgcacgaggacgagcggatcgtgctcagagactcgattctccaggccattggatactgtcctttaaggactaagagaccggatggtggcgggaacatactcgcggacctcttggagacgttaccggaagggttccgagacttcgtactagaacccctcacaccgtggcccgttcggtacagttacggaccaagaggctaaccgggcgacagaagcttaaccggcaggacggaggacgtcgggggccgacgtgacccgctcctacctggtgttcgacgtggggaggtaccgagagctggctgaggagctcgtgaagccggaggacatcgtggtggaggtcggcgccgccgcgggtgataccaccgtcagactggcccgcaacgcccggctggtgatcgccttcgagaagtcggaggagatgttcgaacggctgagggaacgcgtgcgcgacctggacaacgtgatcgtcctgtgcgaggacgggttcgagctgggggaagtgctcaaacgtacggagcgcgtggacgctgtcttcatcgacgtagggggtggggcgcagccgaggttggcactggcgctgtgggaggcttactactcgcgcttccgtccgagggtgatcgtggtccggaaccggaggctctgccggctgatcgagaccgtggaacgcgtggagtgcgatgaggaggtatagccgcctctgacgcggtgatgagggcactcggggccgagcacgcgctccgcgatgaggaggtgaccccactgacggctcgcacgtcgatcggaggatgaaacgttctaccggggggcggaaggttgcccgagggcgccttcagaggcggtcacgaacggcttcagcgagctcggagaaggcctcggagactcgcgagtcgggggcggcgatgacgaacggtttaccttcctcctcggccttccgcttcgcctccgggtctaggggtatccgggcgaggacctcggtgtcgaatcgctccgcgagcttctccgagtagtcgtccgagaagtactcgatcgtgctcccgcactcggggcagacgatcccgtgcatgttactgacgatcccgatcaaccgagcctccagcttatcgacggcttcaccggccttcacgacgtcggagaacgccagggactcggggctggcgaccaggagcacgttacgggcgtcctcggggagcatctgcagcgccgtcatgacctcgtcaccggttccaggaggcatgtcgatgatcaggtagtccaggtcgccccagcgcgtcttgacgaggatctcgcggatgaagccggacttgcgcggcccacgccagaggacggggaggtcctcgcgctccagcatggtgccgatggacatcactttcacgtcacggtagcccgagagcgggaacagaccggcgggcgttccctgtgggggctccgtgaccccgagttgctcaggtacgttcggtccgtggatgtccaggtccaggatacccacctcgtcgtcctcggccagcgcgagcgcgaggttcaccgagacggtggtcttacccacgccgcctttgccgctcatgacgacaaggacgtgctcgacgctctccaggttcttctcgatggcttcgcgttccttctcgaggcgcttctctagctcctctcgggacgggtggtgcgggtggccctcacgtggctcgttcccctcggccaagggactcaccccggttaggtgcacctaatgagtcgttcgaggctcttaaaaccggttcccctgtgtgcccacgtcgagcgacggtaccgatggaccgatcccaggctaaacgatctggggacggtcgacggcacccgggcgcggatcgggctcgtagaggcgggttcagccggcgggagggcgcgggtgagccctgcccggtcatcgccgcactcgttctccgacggtggagcgcccgatgaggacgagccggcggtagcctagaagccgcgccaagcgaccgcactccggtacttcggtacggccgaaggtcttcgccttgatgaggtcccccaacgcccctcccgtgagtacgtcccatacggcgtccatgagcgttgggtcctcgatctcgagtcgttcctccaggtactcacgaagcctgggttccaccttgaaccggtagaacgccccggccagggtgaaggagatcaggaaagcgatagaccctatcgggtcccctcgcgtgcacgcgagcaggagggccgtcgcgaccgaggcgttccccgcgtccccgagcatcacgcgacccttcaggtccagcaggacgtagggtatgagcgccgcccaggcgacggagaccagggtcgggttccaccatgggagggtcgcgacggtggcggtcagcgcggcgaaggtgaacgcgcgcggctgcatgtccacaatgttggcgggttgtgggaggaaccccgccacgagccccgtgatagggtggaacttccaccaacaccacccgaaggccaccaacatcgcggtaccccgggccagatgacccacctcgacaccgaacctcgtgggagtcctgccgagcgcgtcgtccacgaaccccagcacggcgtgggccgcgaccgggacgccgtgggttaggggcgccagatacgcgtatattaaggccgggatgacgccgacgcccctcggtgtacctccccgaacgggctcgtagagcggtccgtccaggaacttgaagatcgcgcacgccgcgagggtcgcaggtgcggacgctacgagtgccaccaacatggcgtgcacggactagcccccacagtcggctcgggaggacacccaagatgggaagattcgagcgcaacttggcggcgatgttcacggaatacgccctgatcagcacgctccaggccctcttctggatcgtgctacctaggaccctgggccctcagcagttcgggaagctcgtgcttctgatcaacttggcggggttcctctccgaccccatccatcaggcggtggccttcgcgtgttctcccgagctgttgggtctcggggatagggagcgcgcctccctgtgcgtttcagctgtgatcgtctcattgatgctctccttcgcggtcgcttcggcgatgctgctcgccatcaccttcctacctgtaccggagaagctccgtatcgtgtcggatccgtgggttgcctccggcttgttggtcttatgtatgtcaccggtgacgaaggtcgtggaaccgttcctcctcgccgccggacggaacgtgttcgtggtggccatagccctgggtcacgccgctaaggtggtgattccgccgctactgaggacttcgtgggtcggagcggcgatatgtaccggactctgcccgttattggccggcctggcgaccctaccgctcgtcggtaggcctcggggatggaatttcgcgatcgggtacctcacacgcggtatggtcatcgtcgtggatcgtctcgtcgagttgggatcgtacgcgtacgcggtcctcctaacgtacctcctgtacggctcgaagacctcggcgttcgtcggtctggggttggcggcctacaagttcgcggctctgacgttggaggcgttcgtaccgccgataacgctcgaagtcggggcgggcgaggaggaacaggcgttcaggggactacgccggtacctcgtcccggcgagtatcgctacggccgttgcgatcgtctcgtgcgctgacctcgcaccggtggttctctcgaccgagtacgggccggcggtgccgatcgtccgatggttctcgctccccacactcctgctcccttaccacatcgcactacgggcgtacctcatcggaagccgtagattgcgtctgctcctcgtgtaccgtaccctttacgcctcctcgttcttcgtcatccttcatacgctgaccggagcgttcgggcccgtgagcgtgccactggggttgttagcggctctttcgtccgcacctccgatggtagcgatgatccgacgtcatacggtcaccgaatgagtaatctcgacgagcacgtcgggcaaatcctctaaccgctccggtccgaccactatctcacacccggcgtgtagtgatacctcgaagatcgtgacaccgtcgatgaacgatccgagctccacggagatccgcggtacgatggccacgtcgagatcccgatgctcgagttcgtggaggacgtcctcacccgtgagcagtccggcgcacccgatgttaccgccgaagtaccgattctccacgattacgggttccaggacctcacgccccaacttctcgttcgtggcccggcataactcctcgatgaccggtccgaacatctcgccggtgaccagtcctaccctcgagtcgacgccgccgagggcttcggcgcaccgtgacgccaggtcgtcaagaccctctagatgttcctccaacggaaccagactgtcgcaggggaccacgtcgaggtccaactcgcgatccatccgtcggcagatctcccacaggaaccgcatctcgtcgggtgtggggggccggataccctcccggttgtacctggtgaccccgaccgggatcaccacgcacttatggaggccccactcgtcgaggttccgcaggattctgggcagggagttcaaattgtagtcgggcacggccacgacgttggcgacggtatcgacctcacgagcagcctctcggaccaactccaacacgcgtgcggcttcgcggacgctctcccgggtcagcttggcgcgttccgatggatcggtggagaggaggtggaagtcgagctggtcgacgtaccgtaggaggatccggagcttccgcccggtcaggaattttccggaagttatcaccttgagcgggaggttctctcggctctccacgagctcgcgcgcccggcggaccacatcttccaaccgcgggtgattcaccagctcggaaggatacatggatagctcgtcgatgacgagatgacgtcgagcatccggtgggagttgagtagcgtaacagtgccgacaggtcggtgagcatggcggtgtgggatcgtccggcggaccgtgagactcgatcagccaggtctcctctccgtcgtagtccaggtgtcgagtcacccactccgtactcacccgggcgatcccccttcagtaccaccgagacaccaccggcagactaaccagaggccgtagatcgccttccgaccctaccactatccgtggcgcgtactccttcgaagtcgccggagtcgcggctgggagtcgacgcccatgctgcaaccacgcactcggggtagtgaacgacttggccccgcgtggccgacggaggaactggacgctacgtcatgctacattccgtcggtgagtgagttatagaaacggtctgggacgcccgtgagaccgtgccggtactacaccccacacttcggctgccgtccttcgacaccgtcgggtagtccttccctttcccgtagcttctccgccagctgcagtattccgagcaagtatcgctcgatcaagctctcgaacgtcaccacatcctccttgggccaggggcagcggggcagccgcaggttccgcggattttccttcctggccagtatgatggcttcctcgaccgcggactcccactccagcaggggcatcacggccggcggtgactcgtaaatcagcaggaaggcctccctgtcggattcctccggaatcaacgattctacgggccgatggacgtaatggttcaagagtgagagcggcaccccgtgcttcaacttcagggcgtagttgagggcgtgaaccgcgtgttcggctgaatcagctccgaccctccgcctcaaatccgggtcctccaggcggatgtagtacgctttcacgcgtatcgtgatgtcaccatgctccaccaggataggtcgctcgggttcgtccgggggaggtgagagcaccgtgtccgtccaccggagctcgacgtacccgatcccgcactcttcctctccttcggcgtagacctcgatcctggggtaagtccaccagccttcctcgataagctgtgccacggtgggatcgtactcctccgcggggacggccgggatcatgagggtctcccggtcaggtggcccactgacgacccagatctcgccggcggccctgaacgcgcatcccggagcccaggctctgggcacgtcttcggggtcgacttggtccctgagaacggcccgtgggttgtcctcacggaccacccggtacgcgtccttttccccgtagaacgactcggtcgggttactttccggtggtgcggccaggtgagactgagcgtaagctaatatgcgctcgaccttaccttccaagtaggcctcgcggaatctcctcggagtcctggtcacgaacgaggtccaagggtcggccgggtagatcacggactcagcttcctgaccgcgcctgccggcacgtccttcccgctgccagaagtcggagacgcggtcaggaattccgtagtgcacgactcgagttacggatcccacatcgatgccgacctcgagcgtcttcaccgtgatcatcacggaggcacgacctcgcttgaactcccgctcggcacgtcggcgctcgtcccgggggagcgccccgtggtgtagagtgacgtatccctcgagcccgtaccgccggcatagtacctggtaagcgtgctccgcctgcgcccgggttcgaaagaataccagcgttttcgagtcctcccggacatatcgggtgatgtcttccaggaggtcggccattttggcggtattccggactacgaacttacggggcgccatctttcccctaccacgaacgtgcgtgcaggtctcaccggtggctcgctcgacctcgccgcagaaggaatccgggtgtcccacggttccggacatgaacaggtgtcggcgatcccggagtgcgcgaacgatcccgagtaacaggttcacctgtctgggaccgtagaagtggacctcgtcccacacgaggcatcgtgcgacgtcggtcaggaactcccagaactgaagccctcgacgggcgtggatccagatcatctgtgggttggtgacgacgatctcggcttcctgaatcctggcgcgccagcccgggtggtcgccgtcggcgatcaccacgtcgtaaccgtaccggatcatccgttcggcctgatcacgggcgagggccttggtcggatacacgaaaacggcgggaaaggtccgttcatgctctatcgccgcgagagccgcctcggtttttcccgcacccattcccgcggtcagtaggacgtggccgttctcgaacgcctcggcggtctccacttgatgtctgtaggcctccacgtccgggagccgtttcgagaacctcgaaagcgggattccggcaccttccggttcttcaccctcccattcgagctcccaccgagcctccatcgatctcacacccataaccggtcggaagggacgtccctcggggggttaaaagttggaaggtagggtgcacctgcacgtgctggtgagagcccgaaaggacgcgtcggccgtggaatcggcgctggagcggtattacccggactgggagtggaaagtggaaacgctcggaggtgagcgcgatccgtcgtggatcgtcggtttggcgcgtgaacggttcgagggttccgacgcactgtggaaggtacttcttctgggccggcgtagttaccccggtcgcgggcgcgtggtctggatggagggatggtcggcggtgaacgtgggcaaggcggaggtccggaacgccaggctgaccgagatcgtggacggtatcgagctaggacgtgccgccccgcgcctgagcgtggctttcagacgggtaccggagctccggcgagggaggttactgaccgagaaccaggacgcggataccatgctccggtggggtaaattcaccgagacaatcgccgagctggctggggaggagctacctcccggtgcgtacttctcactccgaaagccggggaacccgccggaagaagtactctacgacgcctccggtaagccgatcctcaggatcatcacgccggacgaaggcgaaccgagcgtaagcgtgctcggagacggggaacccttcgattctagggcgttcgtccgtgagaaccgtgagacgctggagaacctgttcgaggacgccgtggattttcttggaggagtggcggaggagttcgatgtcctgttcgtgccggtcagcggagggaaggacagcacgtgctgcttagcgatagccgtcgagacgaccgatcgcttagggatcgacgtcgaagccgtgtacgtggatactggatacgacctgggcagagacgtcgtcgaagacgtcggagcggcgttgggagtcgatatcaagcacgtagacgtttccgatgcgtttgaacgtgggttgagggagcggaagcccacccatgagaaccgatggtgcaccggtgtgaagctttccgggatcaagaaagtgctgaaggatttggagggagatgtcctgctggtcgtgggagatcgagacgcggagagccgcaggaggagattgaggccgccggtccacaggaaccggctgctcgacgtacccgaagttaaccctgtgaaaggatggggaggggccgaggtgctcgggacgttgttccgattgggcctaccggtgagcgaactgtacgagatcgggttctataggttgggttgctccgtgtgcccttccctcacggcgtgggagagagcgctcatggagctcagccgatgatcctaactgttggcttcatcgcaactctcaagcgcgtcggaaccgcagtttcctacggactcgacggcgcgcccgcgggaacaacgttacggttattttaacgattgcgtccgggggtatcggttcacttcatgatgatctccacgtgtacttcctcgggaatgtgtatacgcattagccgtcggatcgtacgctcatcgcccttaatatcgatcagccgcttgtgaatgcgcatctcccacttgtcccaggtggccttaccctcaccgtccggagacttccgtgtcggaaccagaagtcgcttagtcggcagtggaataggtccggacatctgagcaccggtttcctcaacaaccttcttgatccgctcacagacctcctcgagtttgtagtgatcggtactcgacaggcgcaggcgtacttcctgggccatcacaccacctcccgaaagagattatctcgaggggaaagagggcttactcctccttttcgatcttcacacacattccggcggccactgtctgacccatgtctctgatggcgaaccggcccagctgtgggatgaagctgacctcctcgatgaccatcggcttcgtcggccggatgcgcaccttcgcggcctctccggtcttcaggaagtccgggttctcctcgatcacctcaccggtagccgggtcgatcttttcgatgagctcctcgaacttgcaggccacctgggcggtgtggcagtggaacaccggcgtgtaacctgcggtgatcgcgctcgggtgctgtaggaccacgatctgcgcgatgaaggtgtcgtccggcgtgaccacggtcgccggctcgtcggggtgacaggctacgtcaccacggctgatgtcgttcttacccacgcccttcacgttgaaaccgatgttgtcacccggctcggcgcgctcgatctcctcgtggtgcatctcgatgctcctgacctcaccctctcccttccggcctccggtggccgtgtaggccggctcgaaccggacggtgtcgcccacctcgagtactccggtctcgactcggcccaccggcacggtaccgacaccggtgatcgagtacacgtcctggatcgggatccgcagcggcttgtcggtcggcttctcaggcggttctaggttgtccagagcctccagcagagtcggaccgtcgtaccacggcgtgttgtcgctcttctcgaccacgttgtcgccctcgaaggcgctgatcgggatgaacgggatctcgtcgacgttgtaaccgatcgtcttgaggagctcggcgacctcctgcttgacctcctcgtacctgttctcatcgtagtccacgaggtccatcttgttgatagccacgatgagctggtcgatacccagcgtcttggccaggaacgcgtgctccttggtctgcggcatcacaccgtcgtccgcggccactaccaggatggcggcgtcggcctggctcgcaccggtgatcatgttcttaacgaagtctcgatgacctggacagtccacgatggtgaactcgtagttgtcggtctcgaacttggtgtgagctaggtcgatcgttacacctcgctcccgctcctcctcgagcgtgtccatgatgactctgaacttgtcctctccctcacccaggtccttgtcctcgatcacaccggtgtcgtacagcaatcgaccgaccagggtggacttaccgtggtctacgtggccgatgaacgcgaggttaatgtgctccttctccttcgccacgggaacctcccccggtttcggttttcgcgacgacccggccgatccccgttttataatattgtcggttatgggaaaagctcggtcattcgacttcctccagcgagacgggtcgatcctccttcacagacttgagggccgccacggccgtacggagggcttgaagtcccgcttcgccgtcgacgaggggatctcgattttctaatatggattcggcgaagtcccgaagctccagtttcagaggttcttccttccgtatattgaaccgtttaacaccctcccgatccatcaaccggagctcctgttctatgtactgaatctccaggatagcctcccgacctgtcacctcgagcctccgttccttgtgcggggtgagccaattcacctctatcagtccggtgggatctccctcgaaccggagcataacctcggcgtaatcctcctgagttcgggtgatggcagaaccggccgcggcgtacacctcctccacctcggtttcggccaggtagcgcatcacgtcgatgtcgtgcacggcgaggtccacgatgacacccacgtcccggatcctgggtggatacggcccgacccgcttagccgacatgactacgatatcgcccaagtcaccccttgagacgacttccttagccttcatcacgctcgggttgaaccgctcgatgtggccgaccgcgagcttcaacccgtggtcctccgcggcgtcgatgatgcgtctggcgttctcgatcgtatcggcgatcggtttctcgacgagaacatgcacacccgcttccaacgcgtcaacggcgatatccgcgtggtacttcgtcgggacgcagatgctgacgccgtctaggtcttcctcctgaagcatcttccgatggtcggtgtaccagttgacgtcgtacttcttggcgacctccttgaccctgcgctcgttgacgtcacagaccgccaccagctccgtctcttcgagctcgtggtacacccgggcgtggtgtgatcccatcatgccgacgccgataacaccggcacgtacggtcaagtggcggcaccccctgtcggagcgtcggcgtgtcggtcctcgggaagcgttaaaactcggcggtcccatgccgtaaattgttacgaatatcataacgattcgcgccgggcgtgggccccatcccccaccccctgggctttcgcccttcgggggcggggtcatcggggactcgtgatcttgaggccttccgttactcctcctcttcctcctcgagtgcttccgccagcagcgcctcgatctgtggcatcagctgctcgtcccggtagtagcgtagctgcattgcaccgctcgggcacgcggcggcgcactgtccgcagccctggcaggccacgtcctgcacctcggcgaccctcttaccgtccttctccaccatttcgatggcgtcgaacggacacacctgcgcgcacgctccgcagccgccgcagacgtcctcgtccacggtcgcggtgatcagctcgatctcgaccttaccctgggacatcgggatgctggcctcgctggcggcacccttcgcctgggccacagtgtccgggatgtccttcggaccctgagctacaccggcgatctggacgccgcggaccttcgtgctgaccggctctagcttcgggtgtagctccttgaagaacccgtccggcgacctgtcgatgcccaggatgtcggcgagcttggagtacgtctcctccggcgccactagaccgcagcccagcaccacgaggtccgcctcgatctccatcggctcgccggtgagcgtgtcctcgacgcgcacgatgaggttcttggtctccgggtcttcgacgatctcggccggtctacctcggatgaagcgcacaccgaactgcttctgggcacgctcgtagtactcctcgtaacccttaccgaacgcccgcacgtccatgtagcagcagtagacctccgcgtccggctcgtgctgcttgatcagctgcgcgttcttgaggatgaacatacagcagatcctgctgcagtacgcctcacccttctcctccttgcccgggcaccgcgatccgacacagtggatgaacacgatcctgtgcggctccttgccgtcgctcggtcggatcacgtgaccctccgtcggaccggcggggttgatcatccgctccagctccagcgtggtgatcacgttgtcgtacttaccgtagccgtactcctcgagcttgctcgcgtcgaactcctcgtaaccggtcgccacgatgatcgtgccgaccttcagcctgatttcctccggctcctggtcgaagtctatcgccggcgggtcctgtgggcacgcctcctcgcacaggccgcactggatgcagtgctccatgtcgatcgtgtacaccaacggcatcgcctgcgggaacggcacgtagatcgccttcctggtgccgattcccagatcgaactcgttgggcacctcgatcggacagacctcggcgcagactccgcagcccgtgcacgcgtcctcgtccacgtaccgcggcttcttctcgatcgttacctcgaagttaccgatgtagccgtccacgtccttgacctcggcgtaagtgatcatctcgatgttcgggtggttacccacctgcaccatcttcggagccaggattcacatggcgcagtcgtcggtcgggaacgtcttcgccagccgtgccatgttgcctccgatcgtcggctccttctccaccaggtacaccttgaagccctgatccgcgaggtccagggccgcctggatcccggcgataccaccaccgatgatgagaacgctgttctcgacctccacctccttcgtcggcacgtcctcgagccgcttagcacgctccactgccgcccgaattaggtccttggccttctccgtggccttctccggctcctgcatgtgcacgaacgagcagtgctctcggatgtttaccatctccatgtagtatggcgacaatccggcctccttgacgcagttcctgaacgtgttctcgtggatcttcggcgtacaagctgccacgactactcggtcgaggtcgtgttccttgatggcttcctggatgatctcctgacccggatcggcgcagaagaacgggtaatccgtcgcgtacacgacgccgggcagtttcttggcgtactcaacgacctcttcgacgtcgacggacgccttgatgttcacaccgcagtggcacacgaacacgcctatcctgacgtcgtccttgtcgcccactggttctcaccccctatgccgttgtggccacgcccggtcacacgatgtccgagttataagcgttgggatattggaggcggaaatcggggagattggaggggagacacaagggcgttagagctgaagtccggggaaacacttcgagagtagcatacagaagatatcggaggcgtacttggtcaggttgttcaccatgttgtccagctcgcttttggcgctctcgtaggcgctcttctcgttgccactggcgctcttaagggcattttctacacgatcatataacattgctatcgggccgaacgatttgatcgcctccttcaagttcacctgaagctccgccgtcaccgcgctcagtagctgcatcaacgtcgcgttcgggccgatgaactggaccagcatcagatggaactcgttcagcggcttctggaaggattcctcgtgtagtttctggttcactaccgccttgaccgctgacagtactacggcgaacactatgtcctcgggtcgtggctcatggtaggcttgaccgcggaggcaatcgatcaccgcagccacaccattgctcaacgcgtcacacagcgactgcgtcaagccgctggccaagctgtagtactcgggtggtatcgtcgtagtgacgttggcggatcccgtcgtggaggttgactttgtttcatccgttccgatcgtgagcggtacaccgacgacgctgacacccacatctgagcctgcatctgcgcctgcagacggcttgacggtcgctgtaggcgccgtttcagtggtcgccgacgtctggagttccgccgctgaggctatcgggatcactaccatcgctactaggagggtcgcgatggcgctagcacgcatacgatcatccctgagcgtaacaggcacgttaccgttttaaaatctctacgaagcgggtggcgggggtgggtagcgatggtgaaccgtccggcccggatctaccgggagtggaagggtccggcgtacacgcgaagggaatacatcaagggagtcccggacccaaaaatccagcagttcgacatggggaatccggcgggtgacttcgacgtagaggtatcactggtggccagggaacgcgcccaggtcacgcacaacgcgctcgaggcggcccgtgtcgccgcgaaccgttacctgaccaagaccgtgggtaggcagaactaccacctgaagatccgagtgtacccccaccacgttctgcgcgagaacccactggccacgggagccggagcggaccgagttcaggagggaatgcgactggccttcgggaagccgatcggtacggcggccagggtgcgtgagggtcagcgcgtggttacggtccggatcgacccggagaacttcgagcacgccaaggaggccctgcgccgcgcgggcatgaagttcccgttcccgttcaccatagtggtcgacaagggtgaagaactggttcaggactgatgcgataccgatccgtgctgaggggggcccaccgtgaagtacgtccggtggttcgaggagatatcgaaggatgacgtcgacgtcgccggaggcaagggcgcgaacctgggcgagatgacgcaggcgggactaccagtcccgcccggcttcgtggtcctgtccacagcctacgatgagttcctcgagcgcactggcctgaaggagaagataaaggaaatactttcctcccacgacctgtccgacaacgacgagcttcaggaggccgcggaggagattcagcggctgatcgttgaggtcgaaatgccggaggagatccgtgaggagatcgtgaaagcctaccgggagctctgcgagaaggtcggtaaggaagaggagttcgtagctgtccgctcgtcggcgaccgccgaagacttaccggaagcttccttcgcgggccagcaggagacgttcctgaacgtccaaggtgaggaggacgtcgtgaagtacgtgcagaagtgttgggcgtccctattcacccctcgggccgtggcttaccgggaggagcaagggttcgagcatctggacgtttcgatcgccgtcgtcgtccagaagatggtagattcggagaagtcaggagtaatgttcacggtccacccctacaccggcgagcgggacaagatggtgatcgaagccgtgtggggtctcggcgaggccgtagtcagtggggaagtcactcccgacacctacatcgtcgacaagaacacgttcgaggtcatcgaggagcagatatccgagcaggagtggatgtacacgaaggacccggaaacaggggagacggtcaaggccgaggtgcctgaggataaacgcgacgctaggaagctgacggacgaagagatcaaggaactggcggagatcggagtagccgtggaggagcactacgggttcccgcaggatatcgagtgggccatcgaggacgacgaagtatacgtgctgcagtcgcgtccggtcaccacaataccagaggagaagggcggagaggaagagatagaggcggaagagttggagggcaagatcctcgtccgcggcctaggggccagcccggggatcggtacgggcgaagtcaagatcgtgatggacgtggacgagatcgacaaggtggaggaaggggacgtcctggtcaccaagatgaccacaccggacatggtcccggcgatgcggaaggcgtcggccatagtcaccgacgaaggcggaatcacatgccacgccgcgatcgtgtcgcgagagctgggaatcccgtgtgtggtcggtacgggcaacgccacggaggtcctcgaggaggggcaggtggtaacggtcgacggagagcgtggagtcgtgtacgagggtgacgtgcgcaaggccctccgtgccgaggaggaagaggaggagcgggaagagaaggagatcgtggtggagcgcccggccgctgagccagtgaccgctacggagatcaaggttaacgtcagcatgcccgaagccgcggagcgtgccgctaagacgggagccgacggtgtcggattgctccgtatcgaacacatgatcctgggcgtgggagtacatccccgcaagctcatcgaggagggtgagcgcgagaaactcgtgcaagtgttgatggacgggatccgcaaggtcgcggacgccttctacccgaagcccgtatgggtcagaaccctggacgctccgaccgacgagttccgcgagctcgaaggtggtgagcgggagcccgaagaaaccaacccgatgctcggttggagaggtattcgtcgcgatctcgaggagcgggagactctcgagtgtcagttcgaggctatccgccgcctccaccaggagggttacgataacatcggcgtgatgattccgttggtacagcaccccgaagaactgcgccgcgctaagcggatcgccaaggaagtagggctcaaaccgcatcgtcaggtcgagttcggaatgatggtggaaacacctgccgccgcggtactaatcgacgaattcatcgaagtaggcctcgacttcgtgagcctcggtaccaacgacctcacccagtacacgttggcggtcgacaggaacaacgacaaggtggcatacctctacgacgagaagcacccggcagtactccggctgatcaaacacgtcatcaacgagtgcaaggaggctggagtgaagacgagcatctgcggtcaggcgggtagcgacccgaagatggccgagatactagtgaaagcgggcatcgacagcatctcggcgaacatcgacgcggtgccccagatccggcggatcgtagcccgggtagagcggaagatactgctggataagatgagggagttctaacgcccgtgtccctcctgaaacatctttccgagctgggattgtccgaacgagaggcgcgggtgtacctgtacctggtccgcgccggtgaggccaacgcacgggaggtgagcgagggagtcgagatcccgtactcgaaggtttactccgtcctacgatcgctggaagacaagggatgggtggaagccgaccggagcgccagacctaccacctaccgaccggtatccccggacgtcgcggtgaagcgagccctggagcaagagctgaacaggatccgacgtgagctggaggaacacgccaaggtcgccgtgaggaaactttccgagatatacagagcggaacgcgagaccgtggcccgcacgtatcacggtaagtccgccagggaaacgctcgcagaagtgctaagatcgtcggaagacatagcctgcatcgtccacttaggccgcaatctgccacgctggctcctggagtcgcttcggcggatggaaggtttgatgatccttagggctaaggaagggtccgaggtcgccgacgaactggaacccgatgtgaaggcacccatcgatatcgaaccccgaaacaccttaatagtgctctcagcggaccgccgcgagtttttcttgggtaagttcggtgagggcgactacctgctctcactcgaggagccgatactggcccaagggattcacgatgcggtcacgagagcgtgtaaatcgcgctcacggcacgcttgagtaccgggtcaggtaagaccctaaagcctaggaaggacagcaccgactccaacttgtccgaagtccacacgcaccagtccagcggagtcctgggcggcggaccgtacgggaacatatgacgcctgacagcccgaacaacggcggggtcgacgttcacctcttccaggagctcgctcccggttctccagtgacagataccacagtggccgcccgggtcgagcttacagagtgggcatctcggaattccgtaaccgatgtcgtgcagtaaccccgattcgagggcgattttgccgtcgactctgaacttccccgacagtcgccagcacaggtaagccaccttcaacgagtgctcgagcctcgtatcaccacggtgtccgcggatgtcgtgcaggcgacatagtcgccgaaggacgcgttcggggagatcggaaaccacctcctccaggacacgtagaaagcgcaaatgtttcgactccaataacgtttccccacggggcgctcagagggtgcgactggcactcaccacctcgacctgattgacctcgtcgacctccttgagagcgtcctcgagcgcgtcggtacctccctcggcgtccggcactaccaccttcactctgatcgccttcagcccgaaggcgataggttcttcctccatgccttcgatgtccacgacgtccatggactcgagcttctcgcggatggcctccttgagttcctcgtagtccacatcggcactctccgggaggactttcaggtccacgagtactttcgacaccactatcacccccttaaggacctatgaagccgcagttgggacactggtaccggttgcccaacctcctacacttctggcatcgggtgatcacgacctcaccgcacttcgggcacggatgggaaaccgcacgctcgccgggagcgatcggtccaccgcacgcggaacatacggcgtagtcggcacgctctatacgaccggcttcggtcatctcgacttcctctgcggcctcctcgatgagttcttcccgcgtcttaccccctgtttccttcagctcttctgaagaagccctctccacgccgacttcccgctcctcgttctcctccgccaatcggtaccccctaaagagcggcccgaaaaggatgctatatcagtggcgggctagcccttcttcttgatgtagatcacgaagtggtcctctccctcctccacgtccaggacctcgtgcccgttctcctcggcgaacctccggatgttgtccttcgcgggagggtaatcgccgacgaccttcaggacctccccttcgctcatctcctccagcttcttcctagtttcgagcacgggcatgggacagatcttaccccgaacgtccagctcttcgtcgtactcgaccatccaggtcacccccgactcaacccatgcgataggtattcggatttgttccctacaattctcaatgggtataaggtcagttaatggtcatatttaaccacgaactccattagtgtaatgcaggaattcgatttaataataagtgagaaagtgtcgagccgaggggatcttgttggatatcagagagatttggaaagagctcggaatcgacctagagcggcatgatgagttgctcgaagccctgccggaggtgtacgaagagatcttcctgagtcaggaaaaccgtcccgagcgtatgtcctacttcgacgaggtagtcgccgatatccacggcgcacgagtccgggagctgtacgagatgagacaggagggtaaaccgatcctagggacgttctgcgtctacgtgccggaggagatcgtcctcgccgcgggcggtgtttgcgtagggttatgtggcggagcggagttcccgatcccggacgccgaaaagtacctcccacgcgacctgtgcccgttgatcaaatcgtccttcggcttcctggtatccagactgtgcccttactgccaagtcgcgacggtaatcgtcggcgagaacacttgcgacggcaagaagaagatgtacgagataatgtcagaacacaaggatgtctacgtgatggaaatgccgcaggtgaaagatgaagagggtctcgagtactggcacgagcaactgattaaattcaaggagttcgtagaggaactatccgggaacgaaatcacctatgagtcattattagatgctatagaacgtgtgaacgccaagcgggaagcctttagaaagttatacgagctcaggaagcacgacccagcacctataagcggacgtgacgcgaacttgatagcccagatagcgttctacgatgatgtagatagattcacagagaaggtaaacgaactcaacgaagagctcgaaaaacgggtggaagaaggcgaaggtgtcgccgaggaagcaccgagaattctcgtagccggcacgccgatgccgattccacactggaagctgctttacgtcgtggagtcctgcggcgcggtggtagtttgtgaggagtcgtgcacgggcaccaggtactttgaacgggaggtcagcacagaaggagacgacgttgaagatcttattaagaatattgcggaggcatacatggaaacgaaatgtgctatcttcacaccgaacgatgaaagagttaaagatattattaagaaatacaaagagtggaactgtgatggggtgattttgtataaccttaaattctgtcaaccgtacgctgtggaacactcaaagatcgaaagtaggctgagagaagaaggaatccctgcactaaaacttgaatccgactacagcgaggaggacgtggaacaactgaaaactaggatcgagacgttcttggagtcgatcgcctagggcccgctcacaccatctcctcgaccttttctatgaccatttcgaggaattctacgtcgttgagcatgctttcgggtggttcgacgaccttgcgcatcctgatgggtactgagtccattcggtaggcggtgccttcccattcgatgccggcgatggttacgggcacgtacaggtcggcgagttcggcggtcggcgtccagtgcgggtccacgcacacgagcgggatcctagccatgtgctccacagccttccgcgggaagtgcgcacccggatcactggcgattacgaaggcggcgtccacttctcccctgatcagtacgtccaccgcggagaactcgcctgggttgtaccgcgggtacccacggctgaagtccacggcgaacgggtagcccgtagtccacgtgagcacctcgttgaagccggtcacgttgtagtgacctcgcatcatgatcagagtccacttcgcgtactcgttcagatctcggatcaagcagatcgcgttgtcgatgttccgatgacgaccccgggacatcgtgatgcccatgccccagaacagtgtgccgaagctggcctccttgatcaggtcagcgacctcgtgcacggcttccaccggaattcccgccacctcctcgcgctcgatctcgatcccgtgaacagccgcccggagcgcgctgatcagctcatagtcctcgttgggtctaacctgcaggtggacgtccgctagctcggccgtagcggtcctccgcgggtccacgacgatgatagtacgatcctcacgacccttcggtcggaagaagccgcgggtgaaggcggtgtaacggctcatgtgccgcgggtgggcgtgcatagggttgcaaccccagtagatgatgacgtccgctcgattcttcacttcacccaatgtacagctaggaacaccggcgtcttgcaatccaagtgttgacggtccatgacacactgaagcggtattatctatcacagctccaactttttctgcaatctctatcccaacttcatgtgcttcacatagcgttgaagaccagccatacatcagaggccatttcgcctcaacaagtattcttgccgtctcttctgcggcgtcttcgtagtcgattttcttccattctccgttctctttgatcatcggctcggtgtgacgatgatcctcctgcgccgtcaagaacttcgcagcaccgatcctacaagcatgccgtacttccacgatctcaccgtcctccacgaccacctctagatcatcacacagcgtaccacagaacggacagaccacatccttgatcactttacgacccaatatgacccccgtaaacgccgtgatcgtctcagcttttgaaagttattaatcccggagttcaatggttattcgtgttcataaagggcgcaacaagcccaatattcatttttctaatacccataaagcagccccaaatgctccggctacgtgggcttcattaggtacgtttatccccatctccagcctgtctgagaggagctcggcgaagacccgacagcgtgccatgccgccgaccagcaccacctcgggctccggcgacaccttgtcgatcatggtggcgacgcgctcggccacggagtcgaggacgcccagcaggatcctttcgacgtcgatcccgcggttcaccagcgagatcacctccgtctccgcgaagaccgcgcacatcgagttgatcttcacgggatcgtccgcgccgctcgcgtgctcgtcgacctccgacatctcgatcccgagccgccggcacacgttctcgacgaacctcccggtaccggccgcacacttgtcgttcacctggaagtccacgaccttgccgtcctccactttcatcaccttggtatcctgaccgcccacgtctatcaccgtcctggcaccttcgaccagctgggaggcacctagggcgaccgcaggaagctcgggcacggtctcatcgaactcgtcgctcagagcctccctaccgtatcccgtgacggccgtgacgtcgaactcgtcgatgcccgcgcctagctcatctagggcacgccgtagcactttcttcacgggacctgtcgactccaccacggtatggtcctcgagcgagccgtcctccacgatcgcacacttcaggtgggaagatcccgcgtccacgccgaggacccgcacggtttgtccccggttgatttctccacgtacatcgccttgacgtcgttgggtgattcattcgatagctattaccgaatttcataccatcacaggactcttcatcaagtactctaatgtcgttttgataccggaaagagcactgattataacgggatgcgataccggctggccgcaccgggggagacgaagcatggccagagtatcaccgctggttacgggactggtagccggcgtctccgccgcgatactgcaggcggtcttcaaggtcagcccaccaccggcgtacgggatctgtatagcgtgccacaccagggacctggtgaactggatagtgaaccatgccgcgggaaccacgctcgggatggcgccggtctccaaacccttcccggtgctgaccgtcgtgggtattttcatcggggcactgatcgcggcgttcgcccacggcgagttcaggattcggaggacccaccatccgattctagggttcgtgctcggtttcctggtcatcaacttcgcactcttcatgggtggctgtccgatccgaacgagcctgaggacgatgtacggggacgtcgtagcgctcctcggactgatctccatagccgtcggcgtgatactgggcgccgagttctacctcaagagaaaggcgtgaggggggaacggagcgtggcggagtacctgcacgccatcgggacgctcgcgttcggcgtgctgatcggctacctgggccagcggtccgcgatgtgcttcataggaggaatccgagacgtgtacctactacgcgacacgtggctcgtgcagggcctgatcgggttcctcatcggtgccttcttcgggctggtggtgttcggagccgcgggtatgatcaagaagttcccgtggttcctgtacaagggagcgtccgccatcccgggtgacgtcctcggcaagaagccggggttcgccgcccacgcggcggtgacggtgataggcggtctcggcgtgggtttcctgtcggtggttcagggtggctgtccgttcaggaactacgtgatggcggccgagggcaacgtgactgcgatggcgtacctgctaggggtgttcgtcggtgcggtgttcttccacgcctgcatcgtgccgatcttcgggccgccgaagtgaggggatggaaatggggctcctctcccgcctccgctccgcgttttcccgggatgagggaccgtcagacgagcgcgagggtaagggcctgatcgtcttcgaaagcgccagggacgcgatgaaggcggagaggaccctcaaggaggccggatacgacgtccgggcggtggccccaccgccggagatccgcgaggggtgcgacctggcgatcgagtacgacctcgtcgacgaggtaggcgtgcgccgaacgctcgaggagatcggtgtggaaccgctgaagttcgtatcactcgaggacccttccctcaagcccatcgagctggttcgcgtcaaggaggtcgacggatacatcatggtccgatgcggcaacatgaaggtgaccgtggatcgggacgggacgatagtgaacgtgtcgggtggagggtgtcccgacgtcccttacctggcgcatgaactcgtgggcaagaacgttctcgagctgtcggagaactcgatgccggcgagcttgggatacacgctctgcgcgtacaccctggacaaagccgtgaggaaggccaaggaagtactcttaggggagggaagttgatcatcgcgggtacggttccgatcgaaggtctcggccccgtggaggggaaggtcgagccgctggacgatcgaatacgcgtcgccggtcgtgagatacccgtttccatggggaccgccgcactggccgccgcggcggcccgtgttctggagttcctgggtgaggatgaaccacggcttatcaccgcgggggatctgggagaaggggacggtagtctcgagatctaccgtcgcctgagggaggtcgacgatgacgtgctcgtgatccactacatcaagccgaagatagacgagatccgacgcgtcgatacgtcaggcaaggtcatcgcggacgccggagggatgtacgccgccaaggccgcgggtatcggacccgagtttcacctgttcctgccggaccccggagaactcgcgttcctcgcggacgagaaggcccatcatccggcctacgttcgagggttcatcgctgaagtcgacgaggaggaggttccgagcctggtgagacgtgcctacgaggaggaccaagtcccggattatatggtggttaaggggaggcgtgaccacgtcgtccaccggggtgaagtggtggagaccgtcgatgagcccctcgtcgaggccatggagtgcatcgggggtacgggcgacacgctcacggggatcgtcgccgcactcatcgccgcggggttcggaaccgaggaggcgtgcgtgatcggctgtagggtgaaccggaggctcggtgaaatcgcgaacgcgactccgacaactaggatacacgagctcaccagggcgataccggaggccctgtgcgaagaactgagggagtgaggaggctaagcggggtccctgaaggccccctcgatctgcttgtacaactgctcggtcttgaagtggttctgctccatggcaccgctcgggcacgccgccgcgcaggtcccgcatcccttgcacaaagcggccgtgacttcggccacgagcttcccgtccttctcgacgagttctatggcaccgtacggacagagttccacgcaggtaccacaaccgccgcagatctcctcgtccacctccgatactatgggctctacggccacctcaccggccgccaatgccgtggcggcgcgagccgcggcggcagaaccctgggcgaccgaggagggtatgtccttcggaccttgacacgctccggccaggaagataccgtcgatcgccgtgtccacgggccgcaacttcggatgtgcttccatgaagaaaccgtccggcgaacgtgaaatactgaggacctcctggatgacgtcggccgagtcccgcggcaccatacctacggacaacaccaccaagtcgtactccctttcgaccacgtcgccgagcagcgtatcctcggcacgcacgatgaggttcttggtctccgggtcctcgactatctccgcgggccggccgcggatgaaccggatgccgtactgcttctgcgagcgttcgtagtactcctcgtaacccttaccgaacgcccgcacgtccatgtagtagatatcgatctgtgtctccgggtacttctcccggatcagctgcgccaacttcatcgcgtacatgcagcaaacgttggagcagtacggattggtcctgtgcgggtcacgtgagccaacgcactggatgaatgcaatacgtttcggtttctttccatcactgggcctcaccaccttgccaccggtgggtcccgaggcgttgatgagcctctccagctctatcgacgtgatcacgttgtcgtagacgccgtacccgtactcctcgcgctcggtcgggtcgcacgtgtcgtatccgatggcgcagatgatagcaccgacctcttcctcgacgatctcgggctcctgatcgaagtctatcgcgtcggcgtcgcatacctcttcgcagagaccgcatcggatgcagtgctcctcgtcgatcgtgaacaccgacgggaccgcctgcgggaacggcttgtagatggccttcctcatccccaggccctcgtcgaactcgttgggcacctcgatcgggcagacctccgcgcacgcgccgcagcccgtgcacgcgtcctcgtccacgtaccgcggcttcttctcgatcttcaccgtgaagttgcccacgtacccgtccacctcgacgacctcggcgtaggtgtacatcttgatgttgggatgcttggacacgtccaccatcttcggtgccaagatgcagatggagcagtcgttcgtggggaacgtcttgtccagctgggccatcctgcccccgatggacggctccttctcgaccaggatgacctcgaagcccatgtccgcgaggtccagggccgcctgaatcccggagactccgcccccgatgaccagggcgcggtcggtcacgtccaccttgatggtctcgagggactcgagcagccgggccttggccaccgccatgcggacgaggtccttagctttctccgtggccctggccggatcgtccatgtgaacccatgagcagtgctccctgatgttcgccatctcgaagcagtaggggttcaacccggcctcctcgacgcaccgtcggaacgtgggctcatgtagcctgggcgaacaggccgccacgacgacacggttcagatcgtacttctcgatgtcgcgttgaatgatctcttgacccgggtcggagcacacgtacttgtaatcgcgcgccacgaccacgttcttcagcgtcttggcgaactcggccacttccttgacgtcgacgacgccggcgatgttcacgccgcagtggcacacgtagacgccgatgcgcggctcttcctccgccaaccaccatcacccctccacaatccgaactagcctaccggcgcggtgaacctcgagcgtgagcctgggacgctcgccgagtacgtgggtcgcacaagacaggcaggggtcgtaagcccggatcaccatctccatccggttgaggacctcgggggaggcgtcctcgggactcctcaggtactcctcagcgaccttcttgacgccgaggtccatggcggggttgttctggaccgtggcgacgatcaggttgacctcggtgatgagcccttcctcgtccgtcttgaagtggtggatcagcgtcccacgcggtgcctccacgcagccgataccctcgcccgtgacgtcgtccggatccacctcctctcggacatcgtcacccgtgatctcgtcgtcctctagcagctcgacgcagcgttcggccgacgacagcagctcgatcgtcctcgcgtaatgatacagcatcgggtggtggcacggtttcccgtactcgtcgacgagctcctcgtaacgcccctgagccctgggcgtggccatcctgtcgcacacgttgagacgggagagcgtgttgacccggtagagtccctcctcctcgcccttgtcgcgcaggtacgggaacttgaggtaggagtacggtcgcacggcctcggcgatgtgatcgaggtactccgacggctcgaactccctatcgacgttgccctcaggatccacgacgcggatcacaccgtcgtacaactcgtgcacgccgtcgctgaccatccccatatggtaagactccagatatccgagctcgagcagtccctcctcctcgaggcgccgggttagctcctcggccaagtcgacggtgcgctccgccagctcgaccgcgctcctagcgagttcgaggagctcctcccgtcggtcctcctccaagggcttagatacgccgcccggaacggcggtgacggggtgtatgggcttgccaccgaccgcctccactatcgtctgtcctatcttcctcagctcgatggcacacttcacgacctcggggttctccctagccagtgcgaggacatggcgcttcataggatcctcctcttcgggtttgaccaggtccggtgccgcgaggaagtagaagtggagcgcgtgactgtgcaccgtcgcggcgtgatgcatcagctcccgcagcttccgagccggctccggaggctccacgccgaagacctcgtcggcggccttggcgctggcgaggtgatgggccacctgacatatcccacagatcctcggcgtcagtatcggggcgtcctcgatcggtcttccttcgaggaacttctcgaaaccgcggacttcgaccacgtggaatctggcgtccttcaggttcccgtcctcgtcgaactcgaccacgatcttaccgtgaccctccaccctggtgaccggctcgacgttcactaccatctccgacaacgtaccgacccccctcactccctatccaccctgaacggcatcagcgagccggcgagcgtgaaccggtagaaccagcctaccacgtcagggacggactccacgagctcggaagggtcgacgtcgtccacatcggcccggaagatcgaggcgatcgcggacatcatctccgcaccttggtcggggatttctccggccggtcccgcacaacccgcacacggtaccccggcttcgggacagcgtgccccgcaccccgcccgtgtagcgggtcccatgcacgggtaaccctgctccagcaagcaccggtccggatcgggctcaccctcgaccgggcggcggatctcgtggatcacggtctcttccttcttccgaggacactcctcgcagaggttcgtcgtcgagagctcgggttcgcgtccgtcgaggatcgctgtgaccgcgtccgcgatcaggtcgggctccggggggcagccgggtaactcgtaatcgacgtcgatgacatcggagagcgggcgaacgcgccacgttaactctgggacgtcttcggacggtatcacaccgtcctcgttctccgtgctggcggtttccacgtagacggtcctcaggagctcctcgttggagtacaggttggccagtcccgggacgccgccgtagcaggcgcaggtacccaccgccacgacgatctccgcacgctccctgaactcctccgctacctctacgttctcctcgttcctgataccaccctcgatcaggaccacgtccacatcctcggggatctccttggtatccatgagcacggggcagtgaaccagctcggcgtcgcccaggaggtccagaagccgctcgtggaggtccaacaccgagacgtggcaaccggagcaacagcacaaccacgtcgtggcgatcttcaccaaacgcaccacccccttcacagccttttcaacctctcacggagttccaatggtcccagctctaacaacgtctgatgaaactcagtcataacctcagcgaacttctcaccctccgaagctgaaatccactcgtatctgaaacgctcaggttcaatgcctatttcggctaaaaatttcttcaataactcggcccttctccaccacttgtaattacctgattggtaatgacaatctcccaagtgacatcctcctacgaacactccatcagcaccttctctaaacgcttttaaaacaagagatggttctattcgtcccgagcacatcacccgaataattcgagtacttggaggatattgcatcctaccaacgccagcggtatccgctcctccgtacgagcaccaattgcagcagaaagctatgattttaggtttccactctcccatagacgccctccggagctcctttgtccacataagaaaaagcttattatttgacaaatttcagcgctattccccgaacttaaaccccataagttacctcctaccgatcaatttgcgtgatcataagtgacatcgatctccattgaaagcgttagagcaactgtcctcgtacgtggccgaaaaccgcgccgggaatcggtgggactttaaactcgcagggatacgggtggggaggggccgtaccgtgacgttctttcgacacatcctgctggcgtccttggcgtgtctcacgcttcccatcgcggcaacatgtgtgaatgaagaattcgaatcgaaggtcgaaagtctgatacagaatcccgacttccagggtacgaaggagatcacgctgtacgcatcgggttcgtacgtgatgacgggccgtatcaaggtgtcgtacagaggaccggaggaagttgagcccgtcgaggtggataagctcatcaacgggctgaaggaactgcgtgaggatctagatccgttggccggtcaaaacgaacccatcaaagatctgctcggcgcactgaaaaagttcgacgacacctcggacgttctggagaagttgaaggagaagacgcaggggttgaagctcgcagcgtgtgagatcgatgtggatctatggtatgtcggggaaactggtaccccaccgtcggacctaccccagatcctccaacaactgcggaccgagggggaacttcatctcagctacaagataccttacccggaagcacacgtatacgtcgtggggagtgtggagctcctcgatcgggcgctgaacctacccatacgagcggtgttctcgtacgattatcccaacgacggctccggtgtgaaggtttcagtggataccgagcatcgcaagttcacgatagaaacgaccgataatatctacaacctgatagtggtcgagctcacgctccacggtggactccaagaggtcgagaaactggcggacctcagcgtcgagtcctcggaggacctacagaagctgctcgagaataccgaggtgaaggtggaatgctacccacgaggaggtcggaccgccgagatcaacggattacccctgatggtcgatgaaggggccgcgatagtggtctacgcggtcgggagcaaccccatcaactccatcgtcgcgtctaagatcgcggagctcatgggcaagaacccgctggtggtgactctaggaaacgccgacctccaggtgggaaccgacggcaagacgttggtcatcaagggatccgcaccgggtggtctggtggtgatctacgggccggccggaccggataacacgctggacgtcacctctcgagtaggcacgttgcaggtcgccagagccctcggagcccaggtaccgccgttagtttctctgttcggatggatactgggaccgctactggggtcgatcacgaccacttacacacccgcgttcagcggcgagctacggatgtcaccccgcggtatcgggatggctacacccgcggtgatcgccgccctactcctcggcgtccacggacgccgccgttctaagtagttccttgtagccgtcgcgctccgggaactcctcgagctcctcggcttcttcctccaattccttcaacacccctctcacttttttccgatccctggaagccacgacgagcacgaactcatcacccggttccgcccgatcgatcgcctcgcggatttgacgggtccccgtcaacctcaccaggaactccaagtccagggaccgtgccaggttgcggtcgctctcgaacgctcgaatggcgcgacaggcggccgaagcgatcacgcggtaatcggcgtactcggtggaaatcgcctggatgataacccccgtcgaagagcgctcgattatcctacgaggatcacccctacggatcgaacagtgcaggtacagcggaccggaccagtggtcgaacttcaggatcacgcgacctcccccgcgccggaaaacctcattacgccgatatcattgttaatgttcggcccggacccagccggcggtcgggaggcggtagtaaccagcgatgaccggccgacgccagccgtccgggccacatcgcccgggtgaggtcccccgaatgggggcgaccgtgatcccgggcgggtttaccccgccccaatccgccacgcagggtcgcagcggccgaacgaaccgggggtccgccgcgtggacccgcgggaactggctgagcggttgaccgagcgcgacttaaggatcctcattcacttagcggaaagcggggaagcaacacccgaggaactcgccgagtcgctggacgtcgacctgggtcccgttatgagatcactctactggctcgaggagcgtgggttgatagagtccgaggaagaaacgcacgaggtgtacgagttaggtgatgaaggaaaggagtacgccgaggaagggctgccggagctccgcatcgtcgaggtcttaagaaagataggcggtgagggacgactggaagaggtcctagatcgtgccggagtgccccggaagctggccggacccgtcctaggatggctgaggaggaaaggactggcggagatcaagagggaggacggggagacgtcgctcgttctcctggaggaggagcctgaggacgtggatcaatccgtgctcgaggcgttggccgctgagggttccgcgtccgtcgaggagcttgcgagaaagctagagatggatgaagaggaagtggagaaggccctgaagaggttgagtgagcgcggtgacgtcctgagagcgcgggaggagaccgtcaagaaagtcaggctaaccgaacgcggtgaggaagtcgcggagcacgccccagaagtgctggaacgtgactggatcacggagctgaaacccgagcatttgagggagggaacttggaaggagaaggagttcaagccatacgacgtgaaggcacccacgagtcctaccttccccggcaagcgccacccactgaaggaggttatcaacgagatacgtaggatcttcctcgagatgggtttcgtggaggtgtccggaccgctggtcgagtccagcttctggaacttcgacgccctgttccagccgcaggatcacgccgccagggagatgcaggacaccttctacctgaaagaacccgccgaggccgaattgccggacgaggaagtcgtcgagaaggtccgggccgtgcacgaggatggtggcgacacgggatccaggggttgggggtacgagtgggacgagggtgtggcccgaaagacggtccttcgtactcacacgacggcggtgtcggttcggaaactgtacgaggtggaggggcctccactcaaagcgttctcgatcggccgggtgtaccggcgcgagacggtcgactacaagcacttgccggagttccatcagtgtgagggaatagtcctggccaaggacgtctcgttccgggacttgctcgggatactcgaggagttctaccgacggatggggttcgaagaggtcaggttcaggcccgcctacttcccctatacggtcctctccgtcgaacccgaggtatacttcgaggagaaaggcgattgggtggagctaggcggtgcgggcattttccgccctgaggtgcttcaacccctggggttcgatcccgacgtggtgtgtttagcatggggcttgggcgtcgaacgactggcgatgctgaagttgggaatagacgacatacgagatctgtacatgagcgacctcaagacgctcctggagctacccaccgccagggcacggcgctgatcagcggtccaggcgtctccacacgtccctccagcgatccccacacctgtgcttaacctcgtacttcagcaggttaagcagcgtggccacgaatacctcgtcggtaccccggatcacggactcgggcctgaacccgttgttcgcgagggtcgctaaccacgggatacccgcctcggagacgaacgcctccaccgacacctcaagctcggacgagaaggcgtcgattaccgccaagacggccgcgtcaacgcacactcgccacgcgtcaccgttcgcggatgtcagcgggtacgagagttccgaaccgcgtgaccacgtgaacacgtccgccagagccgccgagaaaagtcccaggacccctgcagtcagcgacagagggttctcgtcgtcccgtacgtccatagacagtaacatcagctcacgatgacccacccacacgggagcccgtagctcatgaaccctcaactttttccccgttagcacgtccaggatccacttgggaacctgcactgcaccctcccggatccctgagaacacgccgcccagacccccggagatgatgagaccccggtacgcatcgtcggatctgtgaagaccggcactcgggctgaggcccgtgcacacttcccacatccttattaccatgtcttcacggggggccgtagttggagtcaccggtgaaagagcatcgggaaggaacgctgatccgagtgcgggtgaacccggacgcggataccaccgatctgaagggggtcgatgagtggcgtggagtcctagaagtcgacgtggccgcgccgccggtcaagggcaaagcgaaccgcgagctgctcgagttcctcggaaggaagctcaacacgacctgcgaattggtctcgggggagaagtccagggagaagttagtgctcgcacgagatgtctccgtcgatgaggtgaaggaacggctgggattgcgttaagcgtcacgagaagtagtcgagcgtacgcaaggcggcgaccgcgcggaaatctccgagacgggtaacgacgctcggtgtgggcccgggttgaagcgacgggctcatcggcggcggaaccgccgaccctcttactagtgtcccgtcgccgtccccccgggcccttcatcggctgtacccggcggtagccgacccggcgggtcatccccgggatgggaccgcgtcacccgcgggcggggaggccgggcttcggtccggtgggtcatcccttgcacacggagcctcttagtccgaagctccaccggaactcgccgaattttaaccataccgcctgaaacagtcgtagtcccatccgaaatcgtaacgtttttctgaaattaaatacgcccgtggaagggggcgaactcgccggtcatcgccgcccatctggtgattacgcgccggtcggagtcccccgaggtgaaacctccgcccgaggaggcgtggataggcaggccggtgaggcccgctcagggcttccacacacgggtctcgatgatcgcgggcgtaatgctgggaggacccgccgacgttgagttcccgaggatggcccacccgctcgagctaccccattacctcgaaatagacggcgacacttggcgtcgactgaggtgtcggttggagtcactggaggacaggagtccggatttaggagacgccgtccgggaatacatcagggaagcgttcaggtgtataacaaagcccgacttcgcgacggcccttaaagcgtgcactcccgtcatcgcccttgacactccgctgtggcgcgacgcacgaagtgtggttcgcgcgatcgcgaggctactgacgagagtcacgggagtcgaggtacagccccctccggacatcgcggtagaacttcgagcgacgctgtacccgatcgccgagcgggcgctggtatccacactactcgcgcaggcagtagcgcatcgtattcgatcgttggggttacggtcggaatacctgagcgcgtacttggacgcgccctccggtgagtccccaccccgtgaactcggggacgtctccgacctgtacgcgacgctagtgaaggacttcgatgggtacctcgcgcgagtactgcgcttgaaccggtacgtcacggtaacggccggccgtagattcgtgctcacaccggacgattacgacccgacgtggaggggttaccttcaaggtctgcgtaggttctgggagaacagacgtgggatggaggagataatcaggcagtggggcttggcctgatcagctacgcttgcgggccatcagcgagttgataccgtcgatgaacgcctccaagctcgccacgacgatgtcttcccgtgaggagccggaatgcactatatcaccggtctccggatcgcgcagcttgacatccacgtgggtgatagcgtcggtaccgcctgtcagcgcctcagcccgatactcgacgagctcgaagtcgatcccttgatccttgagggcccgctccaacgccttgatagtagcgtccacgggtcccacgccggtagacgcggcctccttcctggtcccgtcgatcttcacgacgatcgaggccgtcggtatagtcctcttcccggtgaccgtcgtgaaatcctcgacctcgatgtcacgctcagccggtctccccagtacgtcctcggcgatcgcgcggagatcggcctcggtgatccgcttcccacggtcccccaaccgcttgaggcgtcggaggatctccaggagctgctcgtcgtcgacgtcgacacccatttgtttcaacttcttacggatcacgcttgttcctacgtgtttacctaggacgaaccggcgttcatgcccgactttctcgggcggaatgggctcgtaagtactctcgtcctttaggatgccgtcggcgtggatccccgactcgtgggtgaaagcgttctcacctaccacggccttgttcggtggtaccctaacgccggtcagcctctccacgagcttggagagctccgtcagccgctcggtccggatgccggtgtccacgccgtacagctcctccagcactaccaccacctcctccaacgccgcgttgccggcgcgctcgccgatcccgttcacggtcacgtggacctgacgcgcccccgccctgacggcggcgacggtgttggccgtcgccataccgaagtcatcgtgacagtgcacgctgaggatgacgtcctcaccgacgcgctcccggagcttcttcaccgccaggaacataccctccggcgccatcactccgacggtgtcgttgtaaccgagacgttcggcgcccgcctccaggcaggcgtcgaacacctcgtacaggtactcgagctccgtcctggtaccgtcttcggtggaaatctccaccgtcaacccgtgatcgcgcgcgtactctacgacctcgcgagcgcgctccaggacctcttcacgatccatccgaagcttcttcttcacgtggacctcggaagtaggtacgacgatgtgaaccgcgtcggcctcggcttcgaccgccgcgtccacgtcacccttcaccatacgcgccatactgcacacttcggcgtcgagctcctcccgggcgatgcgccgaatcgccttgagttctccctcactcgcggccgcgaagccggcttcgatcgtatccacgccgatctcgtcgagctttcgggcgatccgcagcttttcctcgggggtcagagcgactcccggggtctgctccccgtccctcagagtggtgtcgaatatcctcacctcgtccggcgggtccgcgtccgcgttggcctctctcaacagctccctaacggcggataaagcgatcccccacgtcaggcacgcccctacagcctctcctggacggcaccgatgagctcccggtacgcttcttcaagctttcgcggatcggaccttcgtgtcctatcgagcggtgggagcctgaccacctccaagggctccaggacctcgagcaggctcagcgtcaccgcctccgggccggcgagcgtctcggcagcccgggcgtagtccctgagatcgtacaccagggccgtgccgggaccgacggcgacggccacgccgtcgtacttgaggacgccgggccagggaacggccaggttgttcaggctctccaccagtacgggaccctccttacggactcgactccaggcccggtcgatcgtccgacgcagctcttcgggagcgggttcctcgcggacttccctcacctcgcactcacgggccatttccatcgtctcgtcgggcacgtacctgagttcggtcccctccgtgtacaggaacacggtttcgtccaaccggtccatcaggacgtacgcgtcggtctgggcggagaaatacctcaatgagacgtcggacttcaccgcagtccccacgtcgggagacgtccacacgcggtgaacggggttgagcgtgatcaacggcagatcaacctcggcgaccttcgccagcttgagcacgtcacgactgacgggcagcccgagctccacgcatctgcgcgtatggtcgtagtgcaaccatacgttatgaccggacctgggtttgaacggtacgaggtcgagcgcagagaccagaggcaacgcggcggtcgtcttaccggagtcggtttctagaaggccgacgaccagcacgacgtgcgtcacgggccctgcccccgcggggtgagaggagatgttggagtggcgtcccgagcccggttatgaccctttagagacagcggaacgtgtgcgtgggtgggtgtgtgaaggaagacgacgaaagtactaccggttccgggagacccgcttctacggtggatgcgccacggccgacgccgtggggtgcaacctcgactgtgcttactgttacgttaattacccgcggaggcatccctgggaccgacgctggaagtttcaccggccaatcgacgttgtggagcgcctgaagaacatggggggcgatgtcgtgcgtgtttccggctgcgaaccgacgctgtgtaaggagcacatcctcgagctcatcgagctctgcgggcgggaactccccgaccggaagttcgtcctggagacgaacggcacgatcctgggagccgaccgttcgttcgtgagggaactagggaatcacgaacacgttcacgtacgcgtgtgtctgaaggggtacgatcctcaatcgttcgcgcgaatcaccaacgcgaacccggacgggttcgatctacagctccggtgcttaagatatctttttaaagagggaatatccttccacccggccataccccgtctgttccgcccggaagatatcgacaagctagccggagtactctcggacatcggagtcccaccctcatcactcgaagtggagccgatcagggtctatgaccacgtccgtagggagttgagacggcgggggctaacggttgtgcggtgatccagggcttctcacgctggtcttgctcatcctactactagcggtggcctctttgcccgcgggttctgtggttttggcctcggccttagcccccgtggcggtggtcggcggactagcactcgagtacggcctcgtagatccgaggaccgtgcccgtgttcggactactcgcggtccccggactcatcctaggactccgaacagcccgaaaataccccaaacaacacctacgccacaggctaatcatagcggtaattatcacagtgactttttttctttcaaatttaacaatatacgtgtttaagggaacagtatctttcgtagcaggcggagacgtacccaggcatgcttctctagcgttgtctttcctcactaccggtaagcctcccgttttctacgatacgttgaggcgggagtatcgtcccgttcattacccctcgggactcggacacgcggcgatcacggagtcgatcgtgtcgttgttattccatccgaaagatctacgggaagcggcgagctggcgagttcagtacggttcaacaattattgaactcgttgaataccatgtgagcacagccatgatagcatcagccatcatcgacatcatcctccttacgctcggacgattgcctattttagtagctacacttgtagcatgcgcaatatatttgacgtatcctggaccggtgccgttctttcagtcactagctatgctatcagcatcgatcgtagctataattcttaattcacgatggatttcaacatttttaatactaagtgctgtagtaattcatttctatagtgtggtggtcatgagcttacttattccagttctgatccaaactagaaaacaatccactatatcgttactccttggtatggcaactggaatcattatacaattcccttacgtacactggagtgcggcagtgcatttcccacgttatccagcccacccgaatcacttaccaccagatcgggagttagggccgatagtgtacataatacaatttatgtttacagcatttgctgcatatccaccgttcattttccccaatgctagtgatatgctatatactatcccatttatagccgctgtaatgttaatacttatcagaattcggaaattattaccgcaagatctcaaaataatatggatcatgtatataaccactattgttatcttaggagttaccttcgggcgattcattggaaaacgatttttatttactgcaccattgttaacgactttaactttaggttttgcagcagcaaattaccacttattagcgctcagtatactaattagttattgcgctttaactactgattggtggtacatatatttcattaatactccaccaatcgatgtattagaaaaacattggaaactattctataattcattctgcaagggtgagactatcgctacagtatcaataggcttactgccattcacatccacatggaaaccacaaaaggtagctcaggtagttagaacgttcccagaaccaggtttgcccatattggttactgaagaggaaaacaacctcaccctaagacttctaccgttaactcaagtcaaaggcaaatacatcgtggagaagttaccaccaacgaaacgtgtctggtcagtcgacgaccgggcaggctcattcagacggaacgtcctagtagcagcggaacggtacgactcacacgtcctgacgtatgtggcaataatgagctacggctcggtacccaccgtgttagtcattaaggggaagacgtggggagcctccatggccttcatgacactcatggagcctaccgatgatttatcagtgtttatcaggacgcgacatgtccccaacgggtatttagtcagaatctcagattggcaaggtgtgagggttatgaagataacgatctccggggccagatgggttggtgataaactggtgttccacggatctctgagggacctcatcgcgaacatacgagtcaccggcgacttggtttaagagtgcgtgtgaacgtgccgtagggggccagttattgagtgaccccgggcttttcatgctgatcttactagtcctgttattagcggtggcctctttgcccgcgggttctgtggttttggcctcggccttagcccccgtggcggtggtcggcggactagcactcgagtacggcctcgtggacccgaggatcgtacccgcgttcggactactcgcggtccccggactcatcctaggactccgaacagcccgaaaataccccaaacaacacctacgtcatagactaactatagcagtaatcctgctgacggcatatctctcagtggacttgaccttatacgctttcaaagggaatatcggcgctactatgggtgatccttcaagacatgcctcttacgcgctaacgttgttaaccgcgggtgagcccccggttttctacgatacactgagacaggagtaccgtccagtccattatccgtccggtctcggtcacatcgcgattacggagtcgatcgtatcgtgcctgtaccatccgaaggatgtacaggaggccgcaagctggcaggttcaattcggatcagtattccttgaactacttgaacatcacttggacgcggcgttgataacgtcctcgatagtcgatcttctgttgatcgcacgcggacggttaccaatctatataataccccctctagcatacataacatacctaacatgcaccgcacaatatgcagaattcataccgttcttccaatcactagcaatgcttgccgcctcggcagtggcacttatactcaattcacgattgctatcagggcttctcgcactaggagccatagcaatccatgcctatggtgttataattgtaacaacgttaattctagctttactatgggctaagaaaaccagaattacaactgtaaccccaatacttttaggaactataatcggagctattatgcaatatccctatgtacactggagcgtaatgacatatttcccacgctatccggcccaccctaatcatctaccgccagatcgtatacttagcccagtagcgtgtctattacagttctttttcacagcatttgcagcgtatcccatgattctattccctacaactaatagcttaccttatgtgttgccatttacagtaatcaatgttttaatcattattaaagtccgtaaattacttccctctgttcttagagtaatgtggataacatgtatagttacaattctagcattagctgtggtttccggaagtatagtcggaggacgtcttttagttgtagttccattactaacagctatgagtttagttctaccagcagcaaatagaaacttattagcactaggagcattatttggatattgtgcgctaactattcattggtggcttgcaatcataatacatggaaatgaaggtattagtacactaccggtttgggttctaaaagaacattggaatatattctataaatccctttgtaataaagacgttatagccactctacccgaaggcttgctcccatttacatgtacatggaaaccacgtgaagttgcttacgtagttcgaacgttccctgaaccttacacctctatactgttgacagccaaggagggtagtgagatattactatacgcacctccggtgcgagctgaaagaggatacattgtaaagaagttgccacctccggggcgcgtctgggtggccggtaaccgcgctgggtcactccgatgtaacgtcctgatcggagcggaacggtacaaccgtcaggtgataatacacgttaacgtggttaactacagttgggtacctatacccacaataaacatcaaaggaaagctccggaagagggcgatagtgctctcaacaccgaaatcgagcacgttaccggctatcaatgtccaccgtattccggagggtttccttgtcaggatctcgtattcgcacggtgtgagagttgtgaagataacgatctccggggccagatgggttggtgataaactggtgttccacggatctctgagggacctcatcgcgaacatacgagtcaccggcgacttagtctgacggttgagaggggaactaggtcgggtaaggcccctgttcgtcatcgcgtagctccgacgaaacctccctcctcatcccctcgagttcgttcggggtggaacggtcggggaagcccaggtacaggtcatcagggactcccccggtacggcctcctcatcccgtgagccgatcgagtgcctcttcgaaggcttcctcggtgcgttccaggtccgtctcggtgtgcgcgatggacaggaaccaggcctcgtaattcgaggccgcgatccatacgccgtgctctaacaactccctgtggaaccgcttgaacgcatcgtggtcggccgagtttacgtcggcgtaatctcggacctcttcgatcccgaagtacacctggaacatggactccactcggttcacgactccttcgatgccacggtcctcgaggccgtcctccagggcggaggccaaccgctccgccttcgatgagagttcgtcgtagggtcgttcacgttcgagtacctcgagcgtcaccaggcccgccgtagccgacaccgggttgccgttgaacgtgccggcctggtatactttgccctcgggtgcaacgcgcgacatgtactcctccgggcctccgaaggcccctatcgggagccctcctcccaggatcttacccaggcagacgaggtccgcgtcgataccgtagtactcctgggcaccacccaactccagtcggaatcccgtgatcacctcgtcgaagatcagcaaccgctcggtcccgtcgcagtactcgcgaagtactttcaggaactcctcgtcggggggcacacagccggcgttacccagcacgggttccacgatcaccgcaccgatctcctcgtcgaacctctccacggtctccacgaaagcttcgacgtcgttgaacgggcagacgagggtgttctccgccaccgactccgggatacccggtgagtcgggcgccccgagctcggaggccccggatcccgcccggacgagcaccgcgtcgtgggctccgtggtagcacccttcgaacttcacgatcttctcacggcccgtgtacgcgcgggcgagccgtatcgcgctcatcgtcgcctcggtgccggtgttcaccaatctcaccttctccacgttcggaaccagctcgacgactttctccgcgagcttcagctcggggagcgtcggtgtaccgtagtggaagccctcccgcacccgctcgaccacggcctctacgacctcggggtgggcgtgtcccagtattaacggaccgaaggccaagcagtagtcaatcaggacgtgtccgtccacggtgtacaggcgcgaaccctcggccctttcgacgtagaacgggtacggatcgaaccgtcggaccggactgctcacgccgcccggcatcactcgctcggcgcgcttgaagagctcgagcgactcggggaactcgtcctcgtaacccaagctgagccccgatggggcataggagcaggtgcttaatgagtgcctcgcgacttgctacggtatggagggagttccgtgggacgccattcgtttcgaatttcataacgattcgggttggagccgcggccgggatttgaacccgggaccacgggattacaagtcccgcgctctaaccaggctaagctgccgcggcgcgcccgttcgggccacgatcgtcagcatacttatatgttgcgctgccgaccgggcccgatcgctcggtccctcgactcgctctcccgcaccggtcgaaccgtcggtacctaccgggacggcggaaggtgctgggggtaggagcggcactcgtccaactccgcgtctccggggacgggacgagggacggcgcaccacctccggccgaccggacgggtcgctattcaccctccagctcccgcagccgccggaccatcttgacggcggcttctacggcgcgcttggcgtagtgaacgcgctccagggcctccatcctggtcatgcccggaccggagatacctaacgccacgggcttaccgtactcgaccatcagatcctgtatcttcctgaacgcctgttgcgcgatagcctggtcgtggtcggtgtcacccttgatgatcgcacctagggtcacgacggcgtcgatgtcgtcgcgctcgaggagcttcctgaccgccaacggtacctcgaaggatccggggacgaggacgcgttcgacgaccttcgccccaagatccttggcgtgttggaccgcgagctcctccatcgcgtaggttatctcccggttgaattccgtcacgacgagacccagtcgtatctccgacacctgacacaccccgacggctccgcgctccgacacgtccaaaacccctacggtcaccagtcggtggggggacggtattggccgaagacgataaggtctttcgacgcgcccgtgagcgcctggtggagcggttgaagtccctgggttacattagatcgaaccgcgtggccgaggccatgctcaaggtgccgcgtcacgagttcgttccggaggatctccgcgatcgggcctacgtcgactcgcccttacccatcggcaggggacagaccatctcggccccgcacatggtggcgatcatgaccgagttgctcgacccacggcccggacacaaggtgctcgaggtgggggcgggttcggggtaccacgccgccgtggtagccgaactggtgaaacccgacggtcgtgtgatcacggtcgagaggatcccggagctcgcggacttcgcccggaataacctgaagaaaaccggatacgaccgtttcgtgaaggtgttggtgggggacgggaccaagggctacccgcccgaagccccgtacgaccgtattctggtgacggcgggcgccccggacgtcccggaaagcctgctggagcagctgaaaccgggagggaagatggtcattcctgtgggagaccggcacatgcaggagctgtggttggtggagaagaccgaggacggagagatcaggcgtcgtcggcacggtggatgcgcgttcgtaccgctcataggggaggaggggttccaggaacccgaatcttgacccactctagaggatatgtacgaccccggggatgaggagaccggcaggaggagaccgagatgatcgaggaccccgatacccgacccgggggtgaagaccatggctaaagtccctgatcgcgtgctgaaccgctccgaagtcgcccagaacccacaccgggccgtgggcgagtacgtcgaggccgtggtggtgcagatcaagggagatcagggtatccagctggagctcggcctaccgttcggcgtgttcctaccggccggagcgatccgagcggccctagactggcccgaaccggtggatttggagctgctattcatacccggagaagagctgatcgtcaaactcgaggacctggatcttaagaacaaggtagcccgtgtatggatcccggacttcgaggtggaacggctccgagtgaggctcggagagaagccgcctcgccgcgtgatcgagatcatgaccagggaggagttcttcgatctgatcaccgagggtctgaaaaccgccgagatacggccgtccgaccaccgatcgttcaggtacctggagccaggcgatacgctcgtgttcaagaacttcaaggccggcaccatgcgctgcatcgagacggtggtcaggaacgtcgagaaggatctcgaccccaaggaggccgccgagcggttctatcaggaggccggattcgagagccccgaggagtgtctagagggacttaaggagatgtacgacggactgcccgagaaggtcgatgtagccgagttcgagccggtgagggagtgggaagaatgaaggaggaggtggcgaaaaggatcgcatcggaggtagcgccccgggtcgactcgaaggtagtggacaggatctacgtggccgtacgtgagggtaccgaggaagacccggaacccgtcgcgaagctcgtcgaggaaggagaggaagtgtacgtggtcttcatcgggctcgaggagtccgaggacagcggtgccgatagaaccctcgtgaatcccaggaacctcgaagctatgaccgtcgatctaatggagtgggcgaaggaggaattcgaggatgtccacgtgttaatcggcggagtatccttcgtctggaagggtggctcgttccgggatctcctacgacgctacggtgaggatccggacgacttcacggtgatcgaggagaaggccgtcggtattccgccccgctgatccgacgcccgccggagctcctctaagggtattagggagttgtcgcgcttcacgtactctgagcgcgtggctctggctctccgcacgtccgcgatacgtcggccaccacctacggtgttcacagatcgtaggcgcgtccgtcccgggcagcgacggtctcaacgccggtctcgtgctcaatacgtctcgcttcgcgcccggggcctaccctgagcatcttcattccgaaatgggttatgaaaactttccgaagttcgggtgcttccgaaactagctctatcacgtcgtaggtgcaaagatgccctctgatcctgtctgatcccggtctcacgacgttgactatggcgacggtcacgtcctctatcacctcaaaaaaatcttcacggagttccgtgtctccggtgtagtaaatggagtcgtcctctgtttcgagacggaacccgatgccggtaggatccccatgggtagtcggtaccgcttcgagtgttccggccggtaggtcgatctcgtcgccaggttcgagcgccacgacttcttccggtaagcttcggtggtaagcgctgaggacgggaccgtagtcaccggagtcatcggaatacccttccaccgcggaaacggaacccacgaacgtgccgcgacgtttagtcccgccgcgtgtcatagcctcgacgagcacctcggcttcggcgtagtgatcggggtgtgaatgggagacgaacacggcgtcgacggccgtggtgggtcgccgggagagtcgggtactcaggagacatccgggccctgggtccacgtggagatggaagtcgggaaattcgagacgaaaacctccggttctgcgtttctgagtgatcatagcgaaacgtccgccgcctgtaccggcgaagaacactgtggggttgtccgtccaccggttcaacgtctcgttcggcagattgagtaccccgtgatcacgggcaggtcctttccatctatcttcattaccccgtctttcaccaccaccctatctcccggctccacctcctcaggattaccttcgacggccatgacgatctcctcaccgggaccggcgaccacgtcccccatgtgcctggcgtcgacgtcctccgcgagcctgacgacgatccgccgctcggggggaacgtcctccacccctttaccctcttcctcggtgccgacctcgacgacctcgccgacgactccttccttcaagatatcgtaaccttcccggatatgcttgagcatctcctcggcgagtcgccgtctgtgctcgcggagccgttcgatgtcctcgtcgatggccttctggaggcgggctcgagccagggggtccgccttgcccttcacctcgtacgcatcgtactcggagctcacgaggatcgtaccggaggacacgtactcgaagaggtcatccagggcgttccggagggattccaggtcgggtttccctccgagctcggagttcacgaactcgatcaccagttccttgacgaccttggggccttccacgatcagggcggggccgccgaaattcttggagaggaccttttccccttcaagctcaacgatagcgtgggcgccgggagtcgcgtaaacgcggcgcctccgaacgcctttggccgatctcacgccgacttctccggccactacctcgtcgttcactttccagactttcttcctatcgtcgtggaactcgaagtaaccatcctcgacgtcgagatctttcaggaacgattccaattcttcttcggtccttatctcaccggagtacagtttttcttccactttccgcatcttttcctcgtccatacgagcgactagggtgcgacggtccccggccacgagagcaccgtccgtcccggcgtaggccagtaccagggtcaacgcgttccctccccgcgttcggttgagatttcgaattagtctcaggcgtatcggtatatgcaggcgtcaacgttctccagatgacgttcggcggcacgtttacactctcgcataacacagaccggcgtgtaaccgaggtccgctgagtggtattgaggcacgtgctggagaagccggtaaggtatacgttcgtcgatggaagccagaaactccgcgattttctctacctcctcgggcgtaatgtactcgggcactactagggtgctcgggcggaggatcggtggatcttctcgcgcgaattcccgaccgatgatctcgaggttcttaaacgtgtactcaggatcggagaaggatagggcgtagtatatccgtgggtcgtacgccttgacgtccatgttgaaacctccaccggactcgtagcagatctcggcgattctgcgcatgagtttcggtctcaagcttccgttcgtttccaagcacacgcgaacgcggagctcctcccactcacgtccgatctctataacctggtcgtaatggggggtgggatcaccaccgaagaaacatacgcacgtcacgtccggatcggaggcacgacgtttcaaatcttcggcactcagccgctcacgttctacccagtgctcgtaattctggcagaagaagcagtggtgggtgcagcctccatagaatacggctaagttataccgaccgcgctcgggcccccgtgtttccgtgtacttcgggtacccgcgggaggtggcaccggggcagacccacgctcccacgcagttggtggggtgggggtccaaatacgcgcggcccgcgtgctcacggattatcttaccgccctcgtttcgaacgacgccacagtacccgaccttcccttcgggtatcctacaccggttcacgcaggcgccgcactcgagcccctccgacggcggctccggtgggagtccaagctctctcctcgcttcagcgtgcgcctctcggaggatctctcgggctttatcccagcggttcaggatacactccctgcacacgcgtaaaaatgaggatgcgggatccccgcagagttcgcaggtcattcttcttcctccgtcaacacgtgtccgaccagcttcacgtcgacgttcacgccctcgaaggcggactcgagggtggccttgacctgctccacgatcatcagtgcggagggacagaacgggttagtgggccggacgacgacttcgatgttctcctcgtcggcgttcacctcctcgacgagcctcatcgagactatgtcgagtcccgtgtgtgggtctttcaccttcttgagctcctttaacacttcctcttcagagggcaactcggttcacccccgagccttccggagcacctctttcgcgaacttacgggctttttgaacatctcgttcgtcggggtgtcctctggcgatcaagggtaagaaagggtgctctccctttacggtcagttctccgatcacctctccgccggctcgttcgatcttctcgcgcatccatcggatggttttacccgggtgtaaggaatacgtgcagaacagggcgactttcacgtcgctccagtcgttgttgcgcacgaagtgacgaaccggctccgccggtcggaacgcgtgaaccggagtgccgaggaacgcgagctcggcgtccaagcgttcgttgccgctgaggatctcgacgagcgaggcgtccgtggtcgaagcgatcacttgggcgatcagtcgcgtgtttcccgtctccgaaaagaagtatactttgcgtcttatggcggctcacctccgcacgtgatcggcgatcacggttccgggtcaggcatctcgacgaccctttcgagctctaggtagagtttttccatctcctcttgatactcggccttaccgagcgctacggcgtccatgcgttcctccaggtctctcgtagtttcctccgatacgaaccgctcgtagtgggtactgaggtactcgtagacggcctcaccacgggtcgtcgggaatatccacctccgttgcggtacctcgtacacgtacccacgccggaacagcttctcgactatctgcgcgtaggtgctaggacggccgagtccccgctctcgcatgtcttcaaccaactccgattgatcgtacgggtactcttcatgccgttccagcacctccacgtcgcctatttcgagccgatctccctcctccagttccggggtctcccggatgccgtacgccggcaggtcgtactccgttaggaccttagtgaagcccggctcgacgatctccaaaactccgctgagttcgagctccgcgacgggcactcctttgacttcgacctccagcacggcctcctggtagaggaccttcgcgggcttcatctggctggctacgaaacgtcggaagacgagatcgtaaagacgtaaatggtgagaagtcagcgtgacggtggtctgaatcgctccctcacgaaccatcgtccgtagctcctcggcgtcggccggtctggtgggtcttatacactcgtgagcaccttcgacgtgctcggcctcgggttcccaggtcctcggattgtagtcttcggggtcgaagttagcccggatgtagtcccgggctacgcgcttgccctcctccgagaccctggtagagtcggtccggtggtatgtgatgagacctccctcgaacaggtcctgggccagctgcatgacacgctcggacgacagtcgaagtcgtcgggtagccgcctgaagcatggttccggtttcgaaaggtggtttagggtgtatttcacgctcctctcgctcaactcggacgacctcagccttcgctcccctcagcgaagtgtaggtcgactcggcgacaggtctgttccggatccggagtgtcgcattcaattacgatcccccggtctcgcagggttagggcgagcgccgaggtgaatatggactttcgggagaacgggcccgggtcgggtggatagggcatggacacgttgtaccgacgctgatgcgagatagcccccggaggcacccgtatagtggaggggacggggagctccgacggccagggtatccgggtagtgatccggtgaggggtgggctgatcgtggcgaacggcggcggacagaatggtagtacacctcaatcgcgtggacaggcacgggtgatgaacgtcggggctcgcgagcatcacatcgacggaaacactgtgaagttcttcgggatcgagcggtgggacggtcatgctcccgaagtgccagttcctgtcgtggcggcattcaccgcgccgggcgggtcggtagataacgtcgaggaagtcgggaaggaggtactgtctaaaggccaacggtatccccggtccaccgcccgcgccctcgggtattaacggcccgaagatcgactgttatccgcgacagaagtccaggtgcatcttagagggtgacggtctctcgtccccgtggtatttaccactggactccgcgtaggtacgctccgcggggctggagagtctgtggaacactatctgcaccacccgcatgccgggccgcagcttgacgggcatggggttgaagttaaccagttctagcgtcagccgcccacgccatcccggatccacgtatccggcctccacgtgggcctgtattccgagcctgcccaacgacgagcgtccgtgaaggaccccagttatgtccggtgcgttgatctcgatccactcgtgcgtgacggccagcacgagctcgcccgggttgatcacgaactcctcatcttcgtcgatcactatccgctccgtgttctcaccggcgtcgaccgttggatctatgcagggcttatggagtgttttgaacaccacgaactcgttgcctaagcgcagatccagactggccggtccgagggcctcctcgaggtactcctcctcgaggggcttcacgacgatatcgccctcttccaatgcccgtttgatatctcggtccgaaagtaccgtcaaggggagacccccaggttggacctgcggatcgcacacgtttcggacctccatctcgacgaatcccgggacaagtccgtactggaggcggcgatcgagcgtgtcaaggaacttcatcccgacgtcgtggtggtgtccggtgatatcgtgaaggggtggcgtccgagacattacggtgagaccgagcgaatattccgggccctggatgttggcaagctactggcggtcgtaccggacaaccacgacgagatgcgtgggggtgaggtggttttcaggaaacacccgtattttaggagaaagtacagggagttcaccgtgaaaagcccctcgttcggggagctgttgatgtaccccataatcctagagggagacggactctgcgtgatcgcgctcgactccaccgaagcggaccgcagtgacggggaggtagggctggaccagctgctcagagccgaggagctgatacgcgagatcgagccggagttcatcgtgctcacgatgcatcaccacgtgacaccgttcccgggcttgatcgacgtgtcgacggtcctcgacgccggtaacctcagggagttctgcgtggccaacggtgtggacctggtgctggtgggtcacaaacacatccctcgggtcgactacttcgcctccaaagaaggaggttgtgccgtctcgcacgcgggcacgctgtgcccggaggtcgcccgttatgtaccgccggcgttcaacgtggtggacgtcgagcggggggaggtagtggtgcaggtccttgagtaccgagaaggcgagttcagcgaaccgaagctgatgggacgtttcaggatcgagggggaacatctgcgtccggtagaactcgggtacgacccatccaaagcttggatgaggggctactgaactttaatctcgcgttccttgaggtcgacccaacctccgaccctcgcggcggcctccaccatggccttcacttcgcgcggtgggatccccgtttcctcaccgatctcacgacactcgtcgaactccgccttcaccgtgactacctccccctcctcggtctccgcgatcttgacgctgaccctccattcacgctcaccgtacaccacccgaacgtcctcgaacctggagggtacggagtacaccccgtcggcgtcgaacctgtcgacgcccgtggacccggttaacaccatgatatcacgggcgacgtcctccgccacccggtcgggatcctcaccaccgtccactaaaaccaccaggacgtgtccgggccggttcttcttcgtcacacacgggaccgcgtgacacgcgagtacttcctcgcgctcgatcagcttttgaatcgcgtcgcccagcacctcgccgtcccgatcgtccaataccgtaaccaggaacatcaagtgtgaaggctcgtagtccaaccccattcaggtgacccccgggaggatatcgtcatggacgagtacctccggttcctacagatgctggtgttatcggccgcggtagggatggtagtgggactcgagcgcgagcacgctcacatcgcgcgtcggatcgcgggcttcaggacgttcactttaatcggtgtgctcggaggactcaccgcgtacttctacgagttgggatgcgtccccatagccacggtgacgtcggtgggagccgccgcgctggccgtgacgatgtacgtcatgcgggtgtaccagcgtcgattgttgggtatagtcacaccgttggcgctgctggccacgttcgccgcgggcgcgttggtcggaatggagaggttcaaggaaggggccactctagcgatcgcgacggccgtagtactcctctcccgggcgaggatccatcccgtcctgaggaggttgtccgacagggacgtgttggacgccctaacggtgttctcgctggccgcactggtctatccgctctgcccacccggtcccgtggacccttggggcgttctgaacctgaggagggtgttggagatcgtcctgctggtgctcgcggtgacggcactcgggtacctgggagttcggatgtccgtcaggggaggggtactgacgacgtccttggtcgggggtttcgtcagcagctccgccaccaccgcgaccgtcgtggcgaggttcagagagcttccttgggtgcccgccgccgtggtgcccgccgcgacctccgtcgcgatcatacgcaacatgatcctggtcgccgccgtctcgaggaacctagccgtggtgaagaaggtggcttgcgtagcgatccccgcggccatagccgggttcgctgtcgccgtctacgagtcgggtcgcgcggaagtcgacgaggaggatctccgacgggtcgttcgaggtcggatgcggtctcccctctccctgaaacccgcggtgaagctaggtctcctcatctcgggattctcgatgaccctgaagataggacagctgttcgcggggaaagccggtctggtcgtcggtgccgtagtcggttcgttagccagcagcaacgcgatgagcctgagcctcgcctatatggtgaattcaggtaccctctcctcctcgaccgcgggcatactgatcgcactgtcctcgctggaatccatactcgtgaagtacctatggacggccgtgttcggtaagagggaggtcctcgagcgaacgtggcgtacgctcctaccacccacgatcgcggggatagcggggttcggggtagtgctcgcgggttaggtcagcttcttcaacttggccacgaagaacccggtagtaccgtggacgtgcggccacatccgaccagcttccaaactcgacgagactccgtcgacccgtaagggcgggtgtaagaactcgaactccgagcggacgtctacgggacgcaagcgatcccgcttgatcgcctcggacacgacgagctcgttctcctcgggcgtgatagtgcaggtcgagtacacaagcacacctcccggtttgagcagtcgggccgccgcgcggatgagctgacgctgcttcagtgccaactctcggatgtctcggggtccgatcttccacttgacgtcggggtcgctccggagcgttccgaggctggagcacggagggtccaacagcacccggtcgaacttacccacgtaccgcgggttcctacccaacctgcggacgtccgcgcgcaggacctcgatgttctcgaacaccatccgttccgcgaaccgttccagcctacggagtcgtaccctgctgacgtcgacggcgaggatctccgcttcatcctccgtcagctgggctatgtgcgtggtcttaccgccgggtgcggcacacaggtcggcgatcctctccccgggttgcgggttcagtatctcggtcaccagcgccgccgcctcgtcctgaggtacgatgtgtccttcccgccagcactccagctcctccagtcgcagcggttgccccttcttcacccggatgcagtagtcgacgtactccccgcgctccacctcgaagccgtgctcttcgaactcgcggaggacgtcctcgacgtccgccgcggtcgtgttcacgcggaacgtgtagtactccggcggctcgttgtgtacctccatgagctccttgagttcgtcctcgtcgaggagggcaccgaacttctcgacgaaccaccgtgggtggtggtattcgaggcacagccggtcgatctcgtcctccggctccggccgctcgtactcctccaggtccgcgacgaccccgtggacgcggcggtggttcagtccgagctccttggccgcccgggtcgcggagtccgtcaccggtgccgggtgtttaccctcgtagaggacctcgttcgcggctaccatcacgagggcgcgctccaacggtgggagctcggacctcgagacgtcctcgaccacgcgctcgagcgtcccgtagcggcggagtacgtcgtacaccatgctccgcgtcacggactgcgtcttgtcgtcgtactcggacagcgtcttcctgagaacgtactggatggggtacgacttagtcctcatgacctcgatcagcgacttcgccgccagcgcgtaacaccgcgcccagaactccgtcaactcccgtcacccccggaccacgatcgtgtttccgcccctcctcttcgcctcccggagcgcctcgagggcacgacggaccgccggcgactcggcctcccggaacgagcggcggtcgctgggcgccggacccacgcccacaccgaggctgatcgtgacctcgcctttgaactctctttcgaaacgtctacgtatccgttcacattcttcgagtatttcgtctaagaacgcgtcaccgcctgggatctcgacgacgaactcctcggtaccgcgctcccggtccggtcccttgacggccacggcgcccggaaacttcgtcagaaaccgctcaaccagctccgtgagaaggcctgtggcggggttaggagagtactccggccaacccctctcctcgaccacctccccgaaccggtccaggtcgcccgccacggccacgctcctcagcacctgaccagctccacccggcggaccggttcgacctcgtcgatggcccgcaggcactcctcgggcggctcctcgtccatccgtatgaccatgatcgcctcgccgccgcgctcccggcgtcctacctccatcgcggccacgttcacgcggtgctcgcccaggattatcccgacctccccgatgacccccggcctgtccacgtgccacacgaagagcgtcggaccgctgagcttgaaccgtacctcgtacccgttcaccgacgtcaggtacacccgatcctcgaccagctcgcccctgagcgagatctcgtcctcgtccgagcggacgaccacctccacctctcctccctcgagctcgtccgagaccgtgaactcgaactcgatccccctccgctcggcgacgtctacagcgttgaccatggtgacgggctccgtcaacactcggtccagacaccctttcaggacggcccgcttcagcgcctccttttcacggtcctcgagctcaccacccaccttaacctgtacccacctcaggcgctcctcgagtacctgggcggcggcgtcggccagcctttcaccgacctccatcagctccctcacgtcgtccggcacaccggccaacggcaggttgaccacgttctccgggatctcgcccttcaacaccctctcgatctcgcgggctacgatcagacccgcggcccgctgcgcctcgccggtcgaaccgccgatgtgcggcgtgaggaccacgttatccagctcgtacagcgggtggtcctcaccgggtggctcctcggcgaacacgtcgagggcggcgcccgcgatccagccctccttcagcgccttgatcagcgcctcctcgtccacgatcttaccgcgcgcgcagttgaccaggaacgccgagctcttcatccgcttcagctcctcctcgccgatcatcccctccgtctcctcggtcaggggcacgtggatcgagacgacgtcagcgcgctccagcagctcctcgagctcgtcgacgagctccaccccgagctcctccgccaccttctccggtatgtacgggtcgtacgctgtcacctccatctcgaacgccttcgcacgcttggccacctgctgacctatcctacccagtcctatgagacccaacgtctttccggccagctcgacgcccatgaaccgcttcctgtcccactccccgcggcgcaccgacctgtccgcctgcggtatctttcgggccaacgccaggatgagacccatcgtgtgctcggctaccgagatcgagctcgactcgggcgcgttgacgacgatgataccgcgttccgtcgcggccttcacgtcgatgttgtcgacgcccacacccgcccgggcgatgaccttgagattcttagcctcctcgatcagctccctcgtcacccgcgtcccgctcctcaccacccaggcgtccgcgtcccgcacgtgctcacggatctcctcctcgtcggcgtcctccagcacgacgacctctccgagctcctcgagcttcctcagcgcgtcctcgtggatagggtccgtaaccagaatcttggccacggagacacccccggccgggcacggatagccccgaaaatatgttgactgggtctcctccggggccggccccgtcgccccgatggtgccaacgggtccgccaaggtcgacgtgaagcacctgacgaggcgctcactgtacgtgtctcagcttccagcgttctaattcgagtttcacgtcggggatctcgtgtttcccgtcgagggatttcctacggtgacggatcaccttcctcaagtgagcggagtaatgcgcgggccagcctccgagggttctgatcgcgaaggattcgagtcgatcggggagttcctctaacacgtcccggatcctgggtgattcggagggtcgggcgtcgaacgtcagcgcgagccctcgtgcgagtactcgccttgccctcttgtatgggaggtccgaaaccccggtcaggagggtcttgagtaccgagcggaggttgcgcatcaagtgccgggcgagctcgaggacctcgttccggtccagggagacgagccattcgacgaaccgaacactctcgttctcgggtttgcccagataaagggtcctaccgtgcttgaacttcgagtccctccgccacctcgcgacgtagtacggaccgcaggtactcccgctcaccgtccggtaggtcacctcgaggctcggcttcctcttcctccgatggacttccctcaggactcggagtgcccgaatcctctcgaccgggtcggagggtatcgggacgtgcgactcgatcaaccccggtacgcgatccagggtagtggccccagattgtatggaggcaggggaaaggcagccttccaggataaaagtcttgccgttcggaagtcgtgacgtcaatcagctccctgctaccatacaaggtggcgggaggtcgggggtgctaggcgtcgtttcgacggcccgccagcggcacaggtagtagtggcagtacccagaacgggatcttcgacgtcccgctctccccattcctctccgggaacaggaactcgacgttcgggtgctcgcccatcactttctggagctccttctcgctagcaccctggctgtacatcccgatcaccttctcgacgaaccgtaccagcggatcgtcgtgtgatagttggaagcctacccagaggggttccgcgccggaacgcgtgcgcagtaagtccccggagaacccctcgatcccctcacctggcggcgtaccccacctcgcccttagctcgcgcagcttcgagaccagctccgagtccgtactctcccgacggtcgacgaggatcctacccttcctgaggtcgaacgtcgcgtcgatgacgagcgccaggtcctcgaccccctccgggaaccccaggatcctcatgaccacccgatccgagtacacctcgtactcgacgtccaccggatcgaacgatcccaaaccctcctcgtcgaccacccgacccccggcgctcaaagtgagaacgtactcgcaccgcgccggagcccctagcgcggggacgttggtgacgtacccgaagctacacacgtggtccccgaccacgacgtccaagcccaagttcgccgaggaaccctccgtcaacgggcactggttcacgctcgcgatcaccgccggaccctccaaacgctcctccacagcgacgggcctcccgcacgtcagcgggagtaccacccgaacgcgtcccggttcgaccgactcctgcaccctcgagaacgcgaacaggttctccttgggtaggtagatcacgtaccccgccgactccgagtactgcacgacgtccacgatcacgtgtgggtcgtctttccacttgggtaggacccgtttctggaagtactcgtgtaggaattccaggtccttcgagaggctaccctggattaacggttctcctgaggccggggttagtgctagaactagtcctaggacgaggtaggggagcaatgcctccgacccccctcaggttggtagtgggattagaccggccagttgtaccgcgagcgtgacgacctgggctaatatgctcaggaaggtccccagggtcccgaggagggtcggctgtagtaccgagagacccgcgagcgcgagccccacgaccgccccgaggatacgcatacgattggtctccttggaccgagattgtacctggggaggacaatgatattggagggagacgagtgttcacgattctaatactccctcctgatccctaggagtgacagtaccgccgcgagcgccggtaacagcgggttcacgggcatcttctcgttcgcccacgctcgcgtcaaatcttcgatcttcgtcgcgtgatcgtccacgaggtgaccgaacgtcccatgggtaagctcttcatctacggttttcttcttcccgtacgggcaagtttgcatataatcatgttcagcatttttcaggggcgtgtgtttcacgtgcgcctggaaggtgatgtggtaatcgcccttcttatcgtgaacgattacatcaccgtctatcgagtagaggaaatcgactacccactggttcgatagttgttccgcgtgctccaccttagcactgggccggaaggttatccccacggttttcccgtcgatcgtccgcacgaccctgagcggttcctccggcccccacgtgccgttggcgctcctcagctcgatagttcggccgttgaactcgatgatgacaccctgcccggggattacgcgtatgaagaccctctcgtccaacaacagctggttcttgtagcgtacggtcatcttcacgatgaacctgtccacggtacggctgaggtggttctcactgaccttcgtctctccgagggcatcacacctaccgtcccaacaacaactcgcgatcacgtacccctgatcgtcgtacacctcgacgcctacgagcaggtccttgcacgcctcgtaatcgccgtcgacgttcactttagacgtcacgtcggtcacgtggtccgcggccgctcccgtcgggaccacactcaccagcgcgatcaacgggcccagcacaaggggaaacccgcacctcatcttccctcccccgtcaagcgggcccatcggccgcacgcgcgggctgtcgtaccggtcttttcgataagacatcatgggttatatcacgttttagatcgttcccaacccgggttccacacttacggcttcccgtcgggcacctgagcgggcgtcgccgtcccgatcggatgatccccgagtcccgctaccgaagctctcgccgccccgtcggaccgcgtcattgtgatcaccttcctaccgggcgagggacgcgtcctcgtccccagtaccgtaaaccgggatccccgactcctgcgccgtctgaccgggttcgagtgcgaagcccgcccgtccgggtgagcgtgctagggatgtccctcggggcgcgaccactgtacgtgcgttacgaccgtgtgagaggattcctcaccgtcgccccgacgtcgggatggcgaatttgagaaaccgtaatagtatataggaaacgaatacgtctgacattttaattcgcggcacgttcgcgaaggtcacactcgggacgcggggacggcactcgaccggttcctcatctcgggggcgactcatcgggccgaaaccctccccgaaggagcaacgcgtggaatccgtttacacgttcacgctctccctgttcggatgcctcgacgtgacctcggtggtgggtcccaggctcatgaaggactacgggaagaacctggcgggggagtctttcctcaaccgctgttggaatccggggtgttcttcaactgctcgaagaggagtgcaagtgggtggatccggacgaagggctcgtggagttgtatcgtcagacccaccccaagggcgatcccgcggacgccgagcacgcagccgtctgcctacgaaccaaaacggtattgatcaccctagacatttctcggaggtggcgagggagctgaggggagaaagtttagcactgaaacggcggacgccgttcgacttcgagttcgatgtgctcgaatgtagaggttaaggtttaggagtaacgctaggcatgctctgaggttcgagctctacccatcagagcacctccgggcaaccacgcaggtaccatctcaacaccgaattccatttccggtgcagaccttatgatgtgttaatgcgtttacgaatgcaggaaccctcctaccgactggtgagaacccatccccattctcgacgtgacatcttccgaggggtccgaagccatggtcccggcaccgctcgccctcgtcctctccaccctcctgacggttcaacccgcgaactccctacaatggaaggattgcccctggatccaacttggacgcctctcctgtgctacgcaaggactagctgtggattacccgtacgacctggccggagaccacctgctgttggtctcacccctttggccggagggtgatcactaccgcgtgatcttggcggcgtacggggtcgaggaactcccgctgcccctcgggacgagggttcaccgagtgttcgtgccctccgaagtccggcgggtgccctggaagctgtgggaacagatacccgagagtccgaggccggcgaccttcggaccgtggtccgaggtccggtattccctgagggaatgggggtgtccccaggggtacgtgttcgatccggacgagtgggattggagcgaactccaatcctcgctcgagctggccgtcctgctcgagcccgagcggaccgtggacggtgtcttcgccgtcgaggcgagcctgcccgtgagggaggaccggatcgggaaagagcgttggatcaggctcgccctgaccccgggccgttggctggtactgctcggttggaccgaggatttcgacgtgcgcacgccgtgcaggacgctcttccggggggcgcgccctacgacgaggccgagtacgggctggacggcgtgaaactccgcttctgggtcgccgagtacctgttggacctgggagggcgggcgaggataccaccgagcgagtactactcgagcgtggcggggttgttcgacttcttgaatgagttacccggtgggtgggagttccggcccgggttacagcacgagcaccggttgtactacgggtacggggtactgctcgaggtgcgggcggaccgatcgttgatcgtcgagttcaaggcgcccgaagcgggaaaacgcttcagatcggccgataccgtggaccagtggttcctttcaagccgatacatcgcccgccacagccacctcctggaacccctgcgcaaaatcctcagaggttcgagacctgacggaacgtaggtttcctcccgctatttcccgccgtcccaaccccgtcgcgcggcgcgtcgacgaccggtcatgtccgccttcgcttcaaagtgttaacagtccgtccacgcctcgagatttccaagaactttatttttccaccagaaaagtgggttgggtagcatcgggatgaaggtgaaaagggtgaggatcgtcccggccctcaccctcggtgttctggtcttcgtgccgaccggtgtcgatgctcaatgcggagccgaagtggtttcagtgggtcgagggttgtgattgggctaagtacctcgcaacgcgggatacaccgatcgtggactggacaggtgagttgatcggcgagaactggcgcgcgaactgggtcagggccgccaagtacatactatattgcgcaccgtacaaaggcgattccgtggagaaggtaaggcaagcctggtacgggagcatcacgctcgaaggccacgtacccgacaaaggcgcgcccgccaagttcggagaggtagactggagcgacaagagaccggacatgcgttacattggtctcgcgtttgactacttcgaccctgtgttcgacttcctccacgtgccggaggatctgaggagaaccatgagaaggctagccgagctgatggtagggctcggaaaagtttcggagcgagagtacgccgagtcgatactcaaagatgagtatatgcctcccaggagcggggagccctccaggagcagggagtacgagatacgtaacgggcagtactggttacctggggagtggtgttggataaccctgaacggcacctcgctttatggtaaggtagcgaaatccccggcccaaccgtttccgaacgccggtgaggctgagaggaaactcatgaacaacaacccgatgttccaggcagccgtccgactagcgtactgggtggccacgcacataccgttcatcgggtggttcaactggttccccctcgccgggtactgtggccacctcagcccgatgtactacgaggggccggcggcgccactactcttcccggatgagggttgggtgtgcacggaccacgcagtgctcacggtagccctttaccgggccgcggggatcccggggtacgtcggcggtgaactcgaaccgtttggagatcactcatggacggccgtacgacgaaggtagcggttggcacgagatcttcatcgacccaaccgggcccatgatgcacaaaccttggaagatccgggacagcgtggtactagtaccgaaacacaaaccgatgaacgacgatgagtacgcttgtgcgtcatcccagcgcccgtacgacatgctcagtgaggccgtccgcgacgcgatctcacggttcgttagtccggagactatggaaaggttgaaaatcgcttgggacgggcttaagggattgagtatagggttgatgatggagaggttcatctacacgaacttcctcacggcgcagggtgtatctaagctcattgacaagctgttcttcggcgggaatcttgagttcgagatcgggaactggtttgacagagtccgcaggttcccaggatgggacgcgagtgaagacggcgtagaacgacggtggcgtgctttcaagagcgagtgggcgaggtggagagtcaaggagagggagcccaagaagagcccgacgatctgggtgatcatcctagcgggctcactcgccccgctggcttggttccggggcgcacggggggtgatccggtgatcctcctcgtcctcaccgctctcctaaccctcccatacgacgtgacggccccttttacccgtggaagcaccgtgggtgatggatccagagctttaccaaagccataccgtacagttcgaaggtagtggtatcccgcccgcgagaccgtcggaccccaacgcgttccaggccgatcgtttcctactcgtggcaccgctctggaacgaggaagggcgtcaccgcgtgatcatcggtgcgtaccgtaccgagacggtacctctacccgaggacgctaaggtgtgccgagtactggtgccggatcgcgtggaggtcgtagaaacggataacccgttctcggacgagcgaggggatcccgcctggggaattctcagtgctccaagacacttcaagaagcccgttccgacgggaccctggcacgaggtgaagtacactttggaggagcatgatggcattctgctcatcaggcccgagcggaccgcggacgacatcttcgccgccgaggcggacttacccacgcgcgacgggtgggtcaggatcgccctaacaccggggaactggttggtgttactgggatggtccaaggagttcaacctactgacggtcgacggcaagaccgttttccggggacgagtgccctacaacgaggtcaagtacgatctggatggtgtaagcatggtcttttggtactgcggatacgcaatcgacttgaagggttacaaatggttcaaagacgttttcaactctgggacatctcgggaatgctggcttatgttacattacatagataatttggtgtcatcaaaaagtaataaagccagcacggacattcttaactttcatcctttgttgcaatataagataggaattctatatggaccagggataattttgagaattaatactagaaatccgataattatcgagtttaaagcgccgaaacctagggattacattaagtatggatataaagaattttactcagataagtattggagtaattccctaagtccattagaagttattgtaagtcagatattgtacggtgtaatatgtccagtaataactccgccgatcctattaatacacagaaggcgtcgctagagacgggggtgcgaagtgatgttacgactagcgttaactacggatatagtagcccttacggtagttttaggtacccacgcttcccccgttgatgactgcattaagctacataacaatacactctctagggtcgatgaaattcataataagctgaataatttgttaaataaactggaagagtgtgagaaaaagaacgttgacctatcgagtgaaaagcatgatatacgtttgtccttgaagtaccttgaggaagctaaagaagtactctctagggatagaagtaacttagaatagtcgaaatctaagtataattctattaaggatggtgatcgaaaggagcgtcttctggcggagatcatggacggtagcagcggtctcagcatgtgttttcacctcgtccatgagatcggtaggaagttggatgatgtggaggatatcgttgacgacgcgatcaggttgtgtgatgagttcttgcaggataagttggacgttgacgagtttaagaagagattggatgatatgctgacgcgcggtgggggtatcgtggggaactcgggggacgtgaaggacgcggcctactcgatcgagcaggcggtcgaggccaccgtcgctcgggtgagcgatctactggagaagtggtccagggaggacgagtcgaaggctcggtacgagcggttgaaggataagctcgaggggctacgcgggtgggtgttcggcggtctggcactctcgctgctcgcaggcgtcctagtacaactggcaccgcaggaggccaagacgacactgttgcaggcgttgagcgcgatcacccaggtactcgcggtagtactacagctggtccaggtgctccacgggctgctaccggtaccgatctcggcctgaaaccgcccacgctcccctcactttcccgttaaccgccgtgagggctcggacgtcccctatgggatgcccgatccacaccgaccgagcgtcacgcggacacccgacggaggtcacgtcggaagcggaatctccgtacgagatccggccgagcggttgcgtcttccgcatacgagcactgataagccttcccatcgcccccgtcccgacaacccgatttataatagccggcgtcggaacaacgagacgaacgcgatttacttgggggaaacacacatggcggaggtcaggctcgagcccgtgaaggaggtgtccccgccgctgctgcgcgtggtcaggaagggcgtcgaggagagggaactcgtgattaacacgtccaaatgcgccgcctgcgggatctgcgaggcggcctgccccgtgggcgccatctccgtggcaccgccgtccgccgtcgtgcgcaagggagaggacccgatcgacgtcgacgagagcaagtgcgtcctctgcggaatctgcgccttcgtgtgcccgtacgacgtcatccagctgctcgtcaacgggaagcccatgaccgaggccgggctgcccaatcttccgaagtcggtggaggtggacgaggaggagtgcgtgtactgctccctgtgcgccgacacctgcccgcaggaggccatcacggtcgagcgcgaggtcccgacgcccggtgatctcgtgatgggagagatcgagatcgacgaggagaagtgtatctactgtaaggcctgcgaggaggcgtgcccggccgacgccatcacggtcgagcgaccgaagcccagcgccgcggatcccgagcccgagttcaccatcgaggtcgacgaggacaagtgcgtgtactgcggtgtgtgcatgaggacgtgcccggtggacgcgatcaaggtcggctgtatggtctgctacggtaccacccgcggcgagatcccggcgaagggcgaggtcgacgggtccgtcgacgtcgacccgagctcctgcgtgtactgcgggtggtgcggcttcgtctgcccggtagacgccatcgaggtgatcaagccgtacgagggcacccttgaggtcgacgacgaggagtgcgtcggctgcggactgtgcgtcgaggtgtgcccgtgcggcgcgctggagttcgagaagggcggcaaggccggcaagaccaagatcgtggcgcacccggagacctgcgcctactgcggagcgtgcgcccgggcgtgtccggtgaacgccatcaccgtcgtccgtgagggcgtcacggcgatgccggagctgcccaccaaggcctggaagaaggccctggaccgcgtcctaggtcccgtggagaaggagtagcttccctcccgtccgacctgattccttccgcggtgagtagggatagaaacggagtcgaagaactcgagaacggcttaccgtgaaacggaaacggtacgggccgaaccgcgggcctacttcccgggctcgaccccgacgcgttccctcacggtcgactccaccagctcgctttcacgcacgacactgtagagggcccgccatccaccgccctcgttccaccacgtctcgaactcgcccccgagcttctccgacagccacgcgcagagacagagtccgagcagccgggctccacgtccgtcgtacgcccgctgaagcgcctcggacaactgttccgcgcgatcgtcgtaacggtcgaccaggtactcacctacgtcgtccagtacggccagggagaccagcgtccggacggcgggatggtgggtcagatcgaggacggacgacgacagctcctcggtgttcgcaccccacaccaccagcgtcagctcgggcgtcaggaccgggaagccgatcgtgcaccgacccctcgtcagactccgtagcgtcctgagagcgggcgacgacggttccgcgtccccgagcacttgatccagcgcgtcctccggacattccacacccttgacccttctcacggacacccgggctactgacgccaaacgcgccacggctcgaccgatcggccacacctcgtcgggcctcctgatcctgacccgtcccttggagcgacgctccctgattatgtcccaggcacggactaccgcgccgtccacgacctcgtcggggacgccgaagacgcgtttgacgtacttaccatcgaacgacgcctcggtcaaatccggacccccgatccgtacctccgtctgttccaatccgcccggatgtgccgggccacctcgcggaagtaccccgagtgcctcttgtcgggacgcgcccggaccgggatcccgagggccgatgcgaaccggatgacggggcgctcggggatcttgacgacctcgtccttgttgagggggatcttgttgaggatcctgtttagaactccgtcgaagaacttggcctcccgggtcaggccgtccggtgggaccctgttcaccaccgcgagcctcgtcacgtaaagcttgcagaataaggacagttgcctcacgttctcggggtccacgacggggatcaccaaatcgacctgcgtgaggatacccgcgaaagtgtcggaagccgcgttcatcgggggagtgtcgacgacgcccaacggtggcgagctcaagtactcgcggagcttcgagtccagggacccacggtcctctaggtactgaaacagcagctcgttcgccgccgccagcaaacgcctgagcggtttaacccgtctaatccggatgtttttaggcaccgccaggagtgccggggcgaaggacgcgtcgctgtcgaccagcccgtagctaccgaacgacccgttaacgccatcgaccgggacgggctcgtccggatcgtactcgaccacctgaacgtccagctccggtatgggactgtgcagcgatcggagccggaacggcccgtcctcgaacatcttcttgagcgtcctaccgccttcgtcgctccggccctggggatccaagtcgaagaacaccacgggccggcggggcaccccgtcgaaaccctggtagtaacgtgcgaactcgaggccgacgttgaacgcaaccgtggacttgccggtacctcccttgtaggccgtgaaccccactaggaacggcgccgcgggctcccgggagggcaacccgcatcccccgcgagctcgaggcatagggccggtaaccggtgttagaagcacttgaccgctaccgttctcatccggcgttaacggtaagtcgacggataggaccgggcactcccgccccggcggtgtgactttcggcggaatgtcggtgtaacttgaggttacgctttggttgcgtttgagtttcaaatcgtattgttatgggttacgtaacaatttcaaagtgggcccgccgggatttgaacccgggaccaccggctcgtcaggccggcgttctgccgggctgaactgcgggcccgtccccgccacagttgaggtcacttctcccggtatttgagtcttatgccccggacggagcctccgagcgccttcagcgccctctccgtcctctcggccttggcccgggagtaggcgaaccccacgtcgctcaggaaccgcatcacgtcctcccgaccgcagatgaagaggcgttccgtcaccctcaccttaccgtcctccgtcgtgtaacaccgctcccggttcaggccccatctacagcccgcgacctcctccaacatctcaccgatctcggtcatgaagaggtgcagggaacccaggtacacggccgacttcgcctgggtcaggccgatcgcgtaccgaccgtcggaccccgtcagccatccgtccgccccgaagagaccggcgaggaactcggccttgacgccgggaggcgcgcgcaggatccacccgggtaccccgtagacgcgctcgaccttcgggcttcggggcatcccgaggagctccaggtagcgggcgaaggcgcgcgagtgcacgtggagctcgaccatgtccttcgtgtcccaccgtctgagacccgtcccgacgccgagcgtggcgaggtcgtcggcgaggtcacggagaccctcgggttcgccggcgaaagtcagccgcagttgtccgtcgatctcgtggaggctaccgtcgccgagggcgtacccgagcacgcgggcgaggagcgggatcttgtggtcgtcgagcgcgatcgggaggagaccgcggcgtcggaggtaggtcccctgtcggtccgggagcccgggatcccggaggacgggttcaggcgggtcggagaccggttcggcccggagtcgctcgatccgatggtccagtcgggtcccgagacggtgggcctcgcgccgcttgcgggtgtggtacgggaacccgacgtcggtgaggaacccgtggacgtgggtgtccccgtcgatatggagatgggtgcggaggtactcgcgtccggaggggccggtggcgacggcgtggaccccgagggtcaccaggaggtccaggacgtcccgcatgaaggccgcgagcccgtcccggtggcgggcgggtgaggtcatcgtcagggtgacgcgcggcgtggtcgggggagctgtcggcgatggaggcccgggcgtcgaagagaccggagaggtaggcggccttgaggtgggtcgggacgcggtgaacggcgtcgggaaccctcggtccggtctcgcgtcgggggccgagggggaggccgagccggaggagctcgtcggcgacagtcttggagtcgatcttgagggctcggggttccgtctggtgggcgatgtccagggcgcggaggtcccgtcgtagtccctcgagggctccggggtccacggcgatgcgcacgcggcggacggtggtgttccggtcccgacggcggtactcggtgatggagccgcgggcggagacgtaacccaacacgcgaaacagttcggggttgtgttccattccgatgatgcccgagcagtcgttcgagtaccaatgggttaccgtgtacgttctcggtttgcgatagaaatcataccgtgctcggtgtcagtgttaacgtgatggtggacgtttacttcattccggaacgttatcacatcccgattcgggcgtggtgtgagccgtccgtactcggggggcgtgagaagagcactagtggccgcgattgtcctgaccacggaggaagagctcggagaaaccgactaaacaccaccgcgaccggccgcggtccctcacgggcccgaccaggaccgcccgaacgcgttccaggcccaagcctcacccggccgtacccgacgtagcacgtcgcccacccgttccccgcagagcagcgccgtcctcgcgcccaccacgcgccagtcccgacccagcacatccagccggggcgtagctactccaggacccccgagcgatgccagctcctccacgacccagcccgcatcaccgtccgacaaccgaaccccggactccccgacagtgcccgccgaaccccctcagcgaccacctcagcccgggtctcgtccaacagcagcacgaccgggtcgtttcccacctgctccaccaacaggctcgccggggacagctccatcccgagcaaccgatccgactcaggctccagcgcctgcagcaccgcatccagcaccagccaggccccgcccggcacctttccgtacgcctccaccagcgtcggctccaagtgcacgcgggtcaaaaacacctgaggtcaccctgagccccccacccggcccgactaataagcacccacattcacgtccgagccgcgggccggcaggcgtttccgaatcacataatcagatttcctaaaagcggcccgcgagcgcccgcacccccacaccggcagcctgatccccccaccggccgcgtcgatccagggcgatcgaatgcttgtgttagcctgcctgctgctcggactggccgccccaccacggcgacccacgcgttagacctgcccgttgaccccacgctgggcgcgggcaaactactcctccgctaccaccccgggaatgatggtcactggctcgccagcgtgtactataccccaccccgcggccgccccgccgcgtaccacgtgcagggcaacgtggccggcaccccgatacacgaggacgggcgcgcgacccacccacgcgaatcgcgaccgtgagcgtggacgcgcacgcgcccgaactcacccacttcctcgaaccactgaaactcgaacatcacctacctcaactggacccacctccacttccccgaccgcgacctcgaccagcacgtgaccacccagcagaacggaaagccgataaccctacaaccattcaccattccgcgactcccatttcgtgcgcgccgacctcaccggcacggactacggaccgtaccacacgccctacacccggctcgcgcccggagccacgctcgacttcaccctcgacgtgaccgcggaccgctctccgggcagcttctgatcgcccgacgagtactcttcccctacccacccgtgcccaccaccctccaggccgagatcgaacgccccaccaactaccgcctgaacgggaagcaggtatcgttctgggtccccgccccggatgtgaagtacgaggtgcggagcatggtgaaagcgaacggtcagctctcgttccagcacgtgcagggtgtgagcgagcggcaggggatcgtcacggtcgagctgcaaggcgacccggagttcgtgggagtcctcctcaggcaaccaccgcgcgtggcgtacggggtgcgagaccgagtacgactctcgctgcgcggtcgtgggccggccgcccggggtgtaaaggtgtcctggcgtgcggacggtgagcggacgcggatcgagttgagtggtagtgggcgcgttctccttgggctgatcctggacggtggagcgatggacgtgcgcgtggatggtggtagcgtgctcgagacgggaccctgccgagcgggcggggttacgcgatcgtggacgtgggtgtcgtgagcagggagcgcgtgctggtcgtgcactccacctcgcgcgtggtggacgtgctcgcgcgcgtggtgcccgcaccgagcgagggcggggtgcggtaggttgctcctccccgccctactcacgctccttctcctcccggggccggtcgcgggcgccccggttgatcacgcggtcgatctcccgtcggagggctcggtgagtggtggtgacttggatcgggagtgcgtggaggcagtgctcgattcgtgctcgtcggtgcggtggtgcgtggtgcgggcgccgggggtcgaggagggtgccgtgttcgagcgttgtggtgagcggtgggttgaggtgggttccggggattgtccgggacggtgcggtgtgctgctgcgtgggctggacgcggcccgggtgtcttgggcgagcggcacgctgcgcgtgtcggggccggtgggggcgagcgcgtggttgctggtcccggacccgcgaggtttgagggttggtgggacgttcctgcagggtggtgcgtatcccgagggtgcgggtgtgtttcgagatcggagggtgagcgtgcggcggggtcggtcccggtgtcctggtcgctgccggctcgggtggctcgcgagtcggtggtgagcgtggtgtggtatcggaggttcgcccggttcgaatggtcggactgggtggcgcacacgtgggacggggcctcggggcgtcgctcgtcccagaggaggcggtcgtcacggggaatcccggtgctagtggtcccgccgctcgtgcgggggcggcgggcttgacccgggaaatgtcgtgcagatcgtaacgatagagcgtttcggcgcgaaaatctttaacgcggagggctaggttcgatctgatcgcctgctttccgacctgcttacttgcttaaaaagccacaaaaactaacctgaactacaagggtctttataaggagcgaaatagagcggatgggaaagcattattcttcaaacgcgaccacctggtacctggggcatccgcgttggccggtgagaacgagtctaaggaggctgaaaagcgtgaggagctaatcttgtacggcgttcactccacctttgaggacgtggcgaaggcggcaatcccgaagttccggacgacgccgggtcggctgctgttcgcgggcttcatggcgggtgcatttattgcttttggttttaccctggcgaccgttgcggcctgcgtggcgaagtgtccgccctacgtcatgggtggcacgttcaacaagccgctgttcaagctcctgctcggtgccgtcttccccatgggcctgattgcggtcgtcatcgcgggcgccgacctctggaccggtaacgtgcaggcgctcagctcggccaagggaatggggtacgcggactggcggaacgtgatctacaactggttcggcagctacggcgggaacttcattgggtccatcttcctggcgctcatggcgatcccgctcaccgggctcttcggcaaggtcggtgcccccaacctcttcggccaaaccgccatcgagatcgccaaggccaaggtcgctaaggatcccatctccctgttcttcctgggtatcggatgtaactggctggtgaacctcgccgtctggcaggcagcgcgcgtcaaggacggtgcaggcaagatcctcgcgatctgattcccgatcttcgccttcgtcgccatcggatacgagcacgccatcgccaacatgtgggtcatcccgacgggcatcatcgccagccactacaagataacctggagccagttcttccacaacctcatgcccgtgaccctcggcaacgccgtcggcgggttcctcttcgtgccgttctactactggtacctcagccaccccgagctgagcaccaagcgggtctacaaggagctcctcgacttcgtcgccgtgaccatcctgttcttcatactcgcgaccctcatccccgccggcatcgcctacggcctcgacgccgccctccacaaggcctccatgtacgtcgtcccgaccgtgctctccgcctactacgtcgccggcaccttcgccctccggcggctcgtcaagaagtaacgccctcacctccaccgccttttcttgcccgaatcgttacgagaattaaaacaataccatgtcggtacgggattgccacccaccttgtaaccacgcacactgggccaataagcgagcgtgcccctgaccacctcgcagagccgcagagtggattcgtatgcttctcatcctccacgaggcttgtaagtcaagccaagggatcatagacttgtgagatggaatcaacatagattcgccatctaaacccctgatccattatccttcgatccctgagcctgttgactctcataccgcgaactcccggacagcgaatgtcggaaatcaaacgtccagcttggtactcgatcaagtaagctcgagagcatgcgagagaagtaacgggtagctgaaattcagcatccgcaacgccgtttacgacaacatcgagtgagtcctgccaattggatcggtcaagctcgttggcgttgtcactgaaggtcaatcacatgctgcaatgaacattcattcatatgatggcggccatagctctcgcggatttttatttatggggtgttatttagtccctccttagcttccatgattttttgagtactttgaaagctttgaatataattgtccgtacatagcgattactggagtgtaaacaatacactcctcttctttatcatcttctaacacgtcttgaatgttctcagtgaggtcctcgacatcttcagactagcctaatttacgtattgcttccttacactctcgaacatgtttcgcgaaatgtcttgtgacgtttggtagatttcccattttcgataccttgtttagtacctagttaacttctctgcaggaatcctgctctctttactcagtcttctattcaaaaatggcatcactttcatcgcttcctttttagcctactctgcggccaccttaacgtactctcttgccagttctgccagctttttgccatcattagcattcaaattctgggaattcaagagtaacaccacctctatgtgccttattcacaccgttggatcgattccaacacagtgacgggaatcggttcgcagccgcccgtctacaccctcaagaggaagttgacataaacttttcgtaaggaacggaacacacgctgggaagttgccccggtaagtggtatggattgagtaaatgacatagacatagcgtcttgggtaagttagtaagcgaagacgaaacctactgcatctttgtccaggattgtccagaagtgagcgcactgcgaccggtcgatgctgtaagaggaggaatatatccttcccattcgtaccgtctagatggaaacttttgctcgacctcgccttccagttgcacttatctcaacatatccttttgcacttttgatggcctcacggctggatcggaccctcagcaaattccacgagatacaacaggagcagaaacgcgtttacatcccctgagtccgagtatcgagagcgggtcgtggtacactcaccggaacgatcacctctttaggtccagtggagagttctgggcccgggaatcaatcccctacttttgatcccttacccatacatttcgtccagacacatactggttacaacgattaagggttgagggatggccatgcccgtcgtcctccgcccgctcgacccatggtgcgggacggtggtcgactgtcacgatgagagcggggagcgcctcactcgcgtcttcgtggacgtgaccgacgtcaagaggtcgcaggtcaagcgggcggacgcggttatcgtcacgcacccgtaccgggaccactacggcggggttccgaggacgggcccggaggtcgtgtactcggacgaggtgacggccgccctgctcgagctggagggggtcgaccccgggcgcctcgagcgcgtgaagaggtgtttcgaagtcggggtattcgtcgttgagacgtacccgatcaaccacgcggtcccggaggcgcgggcggtcctgctggaggcggacgcccgggcgctgatcacgggtgactggtgcgcgctgggtgagcacccgccgctgtaggagcaggtggacgacgaggtggacgtgctcgtgaccgagttcacccgggccgcctccgtccatccggacgacctggagacggccaaggcccggctgcagcggctccttgagctgcatcgggacgagcgcgtggtgctcctgctcaaccccgtgaacccgctcgtcggggccgccgccgaggtggagaccgtgcacgtgtctcggtgagatgagcacgcggtcaacgtgatccggcgggccggggcgcaccccggggggccgacgtggtgttcaccgaccggccccggtacccgctcctcctctcggacccccggctgatcgaggagcgcctcccgaaggagcccaaggtcgtgatcacggagcgctggttcctgtaccggagcagaaaggtcatgcgggagctggagcggtcggtcccgtactactacgtggtctccgagacgggacatgctaccgagtcggagatccggcggctggtcgaggagctgcgaccccggcacgtcatcctcaggcacgggcccctaccgtcgagggccgtagtcaccgggagctggttcggccgccggggttcgaggagctggacgttcaggtgtgggtgaagaagagaaggggtgggaagctgaccatgtaggacgggcagttgggaggtgcgtcttcgggccgcggcttactcaactttgcttgaccaaaaataaccgatttatatatttatccccccacatttggtacgagtatcgttaattcatcgaacttatacgtagcccggaaggggttgatcaatgaggtctacctggtcttagacggctgtgtcaaggcgtacccgtcagagctctatctgacgtggagtcgcggcgctgttgccaacttaaccagggaacctatagagcagaaaccccaggaatggagctcaatgctgaggttgacggccgccaaaatagctcccgtcctcaaactcctctgcgtggtcttgccagccctcctggagctgataaaacagtcaacgtgagtggagagttaggtggtcaccgtgcggtcccctctcagggctcccagcaagcggaacttctcggtgacgttgagcatttaccgcgtcggcattctgcactccagtgagccaggtggcggctagtactcgtccagcgtcttctgacccgggaccggctcgcccagcgcgctcagcagtgacatcacccggcgcaactcccgcgggtagttgtccgggtccccgtgccggcgtcgggccaccgcggccagcgcccgggccagctcccgcacgccgtcggccttctccaccacgcccttgacagcgtccattccctcgttcagcgcccggagggcccggtgcagggcgtccacggctgatctctcggggttcaggttctcgtcccggtcctcgaacgtctggaggtaggcgcggccccggtaccgctccacgaaccgcaggtcctccgggtcgacgcccaggacgaggcccagccggcgcacctcgtcccagtccggggagccggacttcgacggatacccgtagaaggtacagcacgtagaagctggcctactcgtccagctccccagcctccagcttccgcagctccaggtccaagacgacccgccgggcctcatccgggacctgggcgggctccacctcctcgcccggctcctcgtccagcacccgctcgtgcccggtgtacacctgaagcgccgccccgtaggcgaccaccagcttgtccactccctcgatccccagctcctccgcccgattcaccgccttctcgactcgatcccgcacctcgtcccggacctccgaccactagacctccccgtcgccctcccacggatcgcacgccaggatcaacgtgtaccgggccgcggccttatcccgctggtacagcgaccactgcgcctccgtgtgcacgggccaggctgcgttcacccggaagcccgcgtcccggagggcccgcacgagcgtgtcccaagcccgcagctcccggtgcgtgaacatgaccgtgagccggccgtccttcggcaggcactccctcatcgcctcgaacgacttccggagcccctcctcgaactccagaaccggctcctcctgccgggccgggttcgcgaccacctcaccctccttcggagtgagctcgctcaggaaggcctcggggaagagctccgccaccggactccgcttcagctacacgtagaagaagtcggtgagctcggagtactggacgttgtgtagtagggtgggtccacgacgatcgtgtccggcttctcctcgaggagtgtgggcagcttccgagcatcccccaagatgacccgcggccgctcctttacacctcgaagcagccggatgaactcctcgtacgcctcgagcacgcccttgaccccgaagtcccaccagccaggtaccgcgcccatctcgccgtgatcccaggaccacgcgtacgcgtgctggtcgaagatgcctacgacggcgccacgtccgtagtgccatcgcgagcagatcgtgttgtagttgatcatcttgtcgaaagcaatcatagcgtacacggttagcggctcgcggtattcctcatccaacccctcgcacaactctcggataaccccaagcaactccgcgtgcacgagcaactgccgctcattaaacaacttgtaaaaccgatccacacccttactaagaaccctctcactatcgtacttcgggatctcctcagtagggaccaagtcctccgcgaccaactcccccacgactcgaacaggacctcccgcgcccgtccaaaatactcccaatccttatcggaagccgcccgatactcccgctcccgcccccgaatcctccacgaccgccgctaagtacgcgcgcgaacgggcaactcccccggcggctcaccctcgaactgccgacgagggcgtgcacctgctcgcggcggatcctcgtcccgcaccgcgggcacgtgaccacgccccgactcaccgtgccgttactcggatcgaactcgtccctgacctccgagtacttcacaacatctaactcgacctcgtcaccgccctccggcacgtccggcacgagcgcgtaggacccctccgggtccaggtggttgtcacgcttcttcaacaaccaccagttcgggcgggtgggaatccttaacccgcaccgcgttcaccatcgtgaccggctcctgcaggatccggtccaagcacccctttagcatcgcccgcttcagggcctcccgctctcgatcgcccggctcctcacccaccttgatcacaaccgaccgtaacctgcccttcagcagctgcacgcccgcaccagcgcttcctcatctaccacctcgccccgagcgcagttgatcagaaacgccgactccttcatcagcttcagctctcgctccccgatcatcccctgcgtttcatccgtcaacggtacgtaaatcgtaaccacgtccgcacgccgcaacagctcgtccagatcctccaccagctctacatccagcccttctgccacctcctccgagatgtacgggtcgaacgctatcacctccatctcgaaggccttcgtccgcttcgccacctgccgaccgatccggcccagctcgatgacgcccagcaccttcccagccagctccacacccatgaacagcttccgatcccactctccccgtcgcaccgaccggtccgcctgcggaatccgccgcgccagcaccagcatcaaactcatcgtgtgctccgcgaccgagatcgagctcgactccggcgcgttcaccaccacgatcccacgctccgtcgccgcctccacatcgatgttgtccacaccaaccccggcccgcgcgatcaccttcagattctccgcctcctcgatcagctcccgcgtcacctgcgtcccgctccgcaccacccacgcgtccgcgtcccttacgtgcctacggagcccctcctcgtccgcatcctcaagcaccacctcaccaagctcctccagcttccgcaacgcatcctcatgaacgggtccgtgaccaggatcttcgtcatgcgcgcacccccgcccgggcaagtggaaaaatatattgatggtgaccgtcggacgctcgccgcaactgacacctcagattgttccggtccgagaaaccgtcccacgcgatgacgtcgttccctactaataagcagccctacttgtccgctgaaacggtccgaaccttcacaggctggttaacaaagcggaagaactcaagaaccgtttttcgaggcttcaaacagacttcttcctcgaaatttatctttgtcggtctgcttaggataggaacccaattcatactcaaacggaccaccgaacgcggggaccggggagtaagccgcggggaacccgggcccgtcccgatgtaggtcggcgggaaccccgaaggaggggaccgtcgacccgaagggcccccacgcgggggtccgggggaaccgcggccgaaacccggtccccacccctcttcctccccggaacctcagggggtgagaacccgtggctaggatgcgtttcgtgccgcaggtgtgcccgttctgtggttgcggctgtggcatcctggttggaaccgatggagaggagatcaagctgctggaaccgtggaggcggcatccagtgaacgagggtagacagtgcgtcaagctctgggagctacccgaggccgtgcagaaggaccgtctggagcggccggttcggatgaccgagtcgggcgagccgcgcgagctctcctggaaccgggcgctcgaggaggtggccgaggtcctctcgacccatgagcctgaggaggtgtacttcgtcacctcggccaaggccacgaacgaggacaactacgtggcgcagaagctcgcacggaccctcggcacgaacaacgtggaccactgcgcgcgcctgtgacacgcccctacggtggtcgcgctgtccgagctcctgggttccggggcgatgactaactcgatcccggacctggtcgaggcggactgctacctggtcgcgggttcgaacacggcggagcagcacccgatcgtgtaccgccggatcctccagggtctcgaggagaacgacgcggatctcatcgtcctcgacccgaggcgcacgcagatcgcggaactggcggatatacacctacaggtgaggccgcggaccgacctgatcgtgttcctctacatggccaaagtgatcgtcgaggagggactgcacgacgggacgttcatcgaggagcggaccacggggttcgagtcgttcgaggagtacgtgcgtgaggcggtctccgagggggacgtcaggaggatcgccggcgtggaccccgaggacgtgcgcaaggccgccgtgcgctacgccgaggcggagcgcgggtgcatcctctactgcatgggactcacgcaccacgacatcgccacccggacggtccgcgcgctgtgcgcgctcgccctcctgacgggcaacgtgggcagaccgggcaccggcgtcaacccgctccgcgggcagaacaacgtccagggagcgtgcgacgtgggcgccctggcgacgcacttccccgggtaccggccgatcaacacggaaacagcgaatgaaatgtcgaaaatttggagtttcgaggtgccggacgagcccggcctcaagctcacggaggccttcgacgcggacgagatcaccgtcatgtacgtagtcggcgagaaccccgccgtctccgagccgaacacacgtcacgcggttgagaagctcgaaagcctcgagttcctggtggtccaggacctgtacctgaccgagaccggcgagctggcggacctcgtgctgccggccgccggctgggcggagcgcacgggcacgttcacggccaccgatcggcgcgttcagctcgcggagaaggccgtggagccaccgggcgaggcccggcccgactggtggatcctggaggcggtggcccgacgactggggctcaagggcttcggacaccgatccccgcgcgaggtgttcgaggagatccgacgcgtcgtcccgcagtaccgagggatcacgtacgaacgactccggagacgcccgggcgggatccactggccctgtccgagcgaggaccacccgggcaccccgatcctgcacaccgaggagttcgccaccgaggacgggaaggcccggttcccgaagcccgaggacgtggagtaccgggaaccggagcgagacgtggacgaggagtacccgctgatcctcaccacgggccgcgtgtacgcgcactaccacacccgcacaatcacgcgacgctcgcggctcctgagcgaggaggtgccggagtcgttcgtcgagatccacccgaaggacgcggagcggtacggcgtgcgagacggggaactggtggtcgtcgaaacaccctacggcgagtggcggtgccgcgctcgagtcaccgatcgggtgcgagagggcacgatcttcacgccgttccacttcggcgagaacgtcctgacgccccacgacgttcgcgatccggagtccgggatcccggagtacaagtacgtccccgcccgcgtccgacccgactcccgggggtcggcctcgagggggtagacaccgtgtcgagcgtcgaggttcaggtcggcgggtgctacctcgcccggtcctcggaccccgacaccgtcaaggaggccgcgtgcgggggcgtcgtcacggagctcctccggcacgcgctgcgggaggatctggtggacgtcgtcgtctgcgtggagcggggcgccgacgcgctggacggtcgccccatcgtcgtggacgatcccgccgaggtgccctccggctcctaccactgcgcacctacccagctggcccggctcgtggcggagctgcaccgggaggaccccacgctgcgggtcgccgtcacctgccgaccctgcgacgcccgcaccctcgaccggctggccgagcgggacctggtgaacccggaccgggtgtaccgcatcggcctcaactgcggcggtaccttcgaaccccgagtcgtgctggagatcctggaggagcacggggtggacccactggacgtggagcgggaagaggtcgtcaagggccaccttgtcattgagctccgcgacggcgaggagatttcagtctccatcgacgagttggaggagcaggactccgggcgccgggagaactgccgccggtgcgatgagaacatcccagagcgcgcggacctggcgtgcggcaactggggcgttccagacgacctgcagggtgagtggacgttcgtcgaggtcaagacggaggacgggcgcgacctgctggccggggccctggacgcgggcacgatggaagtgcaagaggcccccggaaaatcggtacagatccgggcgaagatcgacgaggtcatgcggaagatggcccggtcctggcgggagaagacgctcgatgaggattggctgacggaggcgatcgaggcgctcgaccgctgcatcaagtgccgaagttgccggcaggtgtgccccgtgtgcgcgtcgtgcgaagagggctgctggtccttcgctggccgggagtcggtgacccccaccccagtctggcacgcccacatcgcccagtgcgtcgccctgtactgcgtcgagtgcggcgcctgcgagaccgcgtgccccgccgagattccgctgacccggatctacagcgtcctgcgcgagcggctcccggacgtcgtcgagcggctggcggagccggcggaggagtagaccggcgacgccccggtccctccccgctttttctcccgtgcaaggcccactagcaggtatgatcccgaccgacggccttgcgctccgcgcaactgactctttataagcattgccatctctcggcaccccgatttataagacggtggtgcctggaaagcggagcgtcaggccgagtttgggggacgcgcaaatgacggacggtctgctcaagcccgtgaaggaagtctccccgctcaccatccgaatcgtgcgcgagggcgcgaagacgcgggagctggtcgtgaacctcgaccggtgcgccgcctgcggactctgcgagcgggcctgttccgtgaacgcgatcaccgtcgagaccccttccgccgttgtgcgcaagggcgccgacccactcgacatcgactaggagacgtgcgtgctgtgcggtatctgcgccttcgtgtgcccgtacgacgcgatcacctgctcatcgacggtgaaccggtaactgagcgaggcgtccccaagctgcccaagaacgtagaggtcgacgaggaccggtgcgtgtactgcggcgtgtgcatgcgcacctgccctgtcgacgccatccaggtcaccaagccctaccagggtcacatcgagatcgacgacgaggagtgcgtcggctgcggactctgcgtagagatctgcccgtgcaacgccctcgagttcgggcgggacggcaccgccgagaagacccgcatcgtcgtcaacctcgaccgcgtcctggggccgaccgagaaggagtaggcgccctcccccacgtccccggccaatcgttatgaattacaaaacgataggtggagctaaggtgggatgagaacagcggtgagcacggaccgatgaagaggccccagcctcatcccgaccgccacctcttccccggccgcacgcccacccgctcctccaccacatcctcgatgagctcactccgacggatccgagagtacagcccctgccagccgccgttctcgccctcccaccacgcctcgaacccctccaaccgctccgacaaccacgcgcagaggcacagaccgagaagccgagccgatcgctcgttccacgcccgacggaaacactccgacaaccgctccgccgccttcccccagcccctccaacaacacgcccgccgcatcttccaacacagccagcgcgaccacgccgcgaaccgggtgcacgtccacccggcggtacgcctccctcagcacggccgccggtccctctccgtcgaccccccagcacgccaggcccgcgatccagccctccttcagcgccttgatcagcgcgtcctcgtgtataggatccgtcaccagaatcttggccacggagacacccccggccgggcacggatagccccgaaaatatgttgactgggtcctctcctccggggccggccccgtcgccgtgatggtgccgacggatccgccaaggtcgacgtgagcacctgacggggcgctcacggtacgtgtcccagcttccatcgctctaattcgagtttcacgccgggagtctcgtgtttcccgtcgagggatttcctgcggcggattatcctcttgaggtgagcggagtaatgagcgggccagccttcgagggttctcacgaggaagggttcgagccggtttgggagttcttctaggaggtcgcggattcttggtgattcggagggtctggcgtcgaaggtcagtgcgagcccgcgggctaacaaccgtcgggctttcttgtatgggaggtccgagacctcggtcaggagggtcttgagcaccgagcggaggttgcgcattaactgacgggcgagctcgagtacctcctcacgacccggggaactcgtacggtacacggacaagacagcgagcgggctctcggtgcgcatcgtggactggtgcgcgctcgacccgagggcgtacgacgaggggcgacgtagggtcgcggcccgagcctgcccggatccgcagccgtactgggtcaacggtgagccgttagtcttccagacaccgaccctgatcttcggagaccggggcgacggtaaatacccgatagcgtggctcctcaagatccaagcaccatcggacaaacggatcaccgagctggactttccggagcgatggtggaagaagggaggtctcctgtggatactggcgatcacggagctggccgaggacggtaggtactactcggtgttcccggaagaggatctgctgtgggatccgtaccggagggagggctgcccgtacacgccccactccgacctggacatctgcacccggctcggtgtgcctttcgcgctcaggtactacatcgacaaagcacccgcgccgactccggacatgctttggaaggcgtacgtacggggagtacccccaccggacgacggggttaccaccgacttcgggtccgtcctgcacgggacacagtggtacaccgagggcgtctcgaaggctacggaaggtctcaagctcgcactgtcggcgctgacggcactgtacgactcggcggccaagcgacaggccgaggacctcgggttgaaggcgtacagggcgtacccggcggtggtccaaggagtcgtgtggtcgagcgactcgtcacagctgctgatctaccagcccacgctcggagttagcttctacgatccaccggtcctcgttcgagcgctgaactcgtacgcatccgcgcttctggccgcggccgaggacctggtgctgaggatcgccctgggtcgacctcagctcgcaccgtggcagtgtgacgacgctcggctggagaaccagctgagggaggagttcgtacggaaagtgaacgaggagctagggctcaacgaagcgaccgtcagggacttcacggaggcgatcgaccgtggaaaagaggacttcgagagcttcctgaaacggacaggagtcgtgaaggtcgacgctgaggtcgaaacggccctgtcgacgctcctcgcacgcgtctgtgggttgagcaccgaggcgacggtgtacacctactactcgatggccaccggggagatactcccgctggtgatcaccccgagggcgctcccatcgaaaggtggggtcacaacgggcagcttctgcagcacgctgacggacaacctcaggaaggcggaaccgggcttcacggcgtcggacgacctcctatcgacgttcaagtactatttcaacaacccactgatcaacggggcgatggcgacgctactctcgtgggggatagagtgggcgatcatcttgtcggcagggctcatagcaggccccttccccgcggcggcggaactgctggtatccggtgcaccgtacctggcggccttaggttcgtccgcgatcatggcgctgctagacggatggttgaacaacagaacatgggatcaagtctcggaggagatagccgtgggcgccgcggccggtacggcggtgtacaggtccgtgggcaggtacatctcgaagatatcggagtacgccgacacgaccgcctctaagatcatagcgaggtactacgacttttcgttcaactggagcgccaactcgatcctagcggccacgtcgaacctgtggttgatagggggataacgcccgttgtcccttctttaccaggtctacctgctgcccctcgcccttatctacatcttcttcgcgtcggtggtactgtggccgatatcggtagcgataattgccgttaagtggaggagggcacggaagatcctaaacgaagccataggatcaggtacggtgggtccctacggtggagtgaatggagagaccggggtcagactctcctctacgaaggtagtatggtactacgggatcttcgacttcccaccgataggcttacccgtcgtagcactactctccgctgtcgctctaggaaaaggctgggagaatctcacggcatgccccgggatacggaacttatcgatgagcttactcacctgggtgttcgtgaactcctgtcttctaggtatcgtgggtaagctggtgtggtaccttagactcaagagactagatgtcaagttcatagccgagtccaaaaagaaagtaaaccgtaacatcatcaagaagatctgcgagaagtacaagtacatcgacgtgtactcagcttttaatgtaactctcatgatgtggttttataatatatttgcgggaggaataatagtgtcgctgtttacgctgatattttatctgactaacaccaaaacattgttgatacataggtattactacaacattttaactgtgtcaataagtttagtaatattaacgaactcggtactgataggattatggttttctagacgtaagtacatttgttcaccgaagatacagtcaaactctattattatatatttaatcacagctatagtgacgatctatacatcagtaatatcatgtgctatgttcgagtacgtaataactgggtcgctttcctgaagaccggtccgaaaactcctggacaccctcgcgatccgggatcgcgcgatgacctctaggtccctcgcaacattagagctctcacgccatctcctgcgcaaccgttgaattaacttcaaagagcttgtaccaagggtacgaccgcctgtgtgtgcggctgaagatgggggtacacgtttgtcggacgacaagcgctcctacgccagaccgctcggtaggaccgcgatgttcgtggtcgcgtccggagggtactaccagctctactggttctaccgcaactggaaggacttcaaggagtacctaggccgcgacgtcaacgtggtgctcagaacgatcgggctgttcgtaccgttcgtcaacctctacctggtgtggaagcagttcgtggagatcaacgagttactcgaggaggccggactcgacccgtgtccgaccaagatcctgtacccggtgtggttcgggttcttcttcgccggcaacagggggattttccacgccgagacgcgggtggacgcgctcggcgcgatcgtggcgttgatggtgtcctgcgtaccgcttctggtggtgcagaagaagctcaacgagtactggagggaggtacaggggggacttacccccacgtggagtgtccaagggcgagctgacggtggtggcggtgtcgtgcctgctgatatggggagggttgctgatctgggagtgaacgcccgatcccgtcgcaccgactcgggtgaaccgcgggcggagacgtaacccgcgcggaaaggccggggtcgggttccaccggtcgtacccgggagcgccgtcgggatgaagaggttatcccacgcggtgcccgtctgccgcgcggggggaggttgtcgccgtgggtggtggcgttcgagcggcgttcggactcgccctggtggtgttgatcgcggccccgtcggcgggagcgggagcagcggccgggatgcaggaggacccgacgtgggaagagtgggcgctgagtcacgtcacggtggccgtcgcgggcgggatgatctcgttcgcggcggcgtacgcgctggcgtcggtcgcggaggcggtgaccggtggacacgtcggtgaacacgaacgtggggaggtcgaggcctcagccacctcggccgaggttccctcggtgtacgggcggggcgcggcggtgggtctgaaggccggaacgatattgtatccggcgctgccgatgacctcggcctcgatcgggatgatctcggggtacctgatgtccgcggacgcgtggagggggacgttgggcgagcggacgtgctggccgggttggggatcgtggacgcgtcgatcaaggggcggtcctgctcccgtcgttcgaagtgccgctgttgacctccctggtcgaaggggagtgggccccgtcccacgatccccggatgggaggcttgggactcgccatcacgggtctgctgttcctcctcccgacgatggcgacggcggaggtcgtctggggaccgctggtggtgacgctcgtgacggcgttgaacgcctggtacgcggtgaaggcgctctcctcgggcccgtctcccctggtcccgctggcgctgcttgagccgggactggcggtgctgtgcgtcgtctgcgaacccgtgaggacgtggctggcggggatcccgaaactggtggccggtgcgctgatttgtttggaaggcccggtcgaccggctcttccgggtggacgaggtatccgacgacggtgacgctcgagccgacgcgggccggtcacctatccccaccgggagcgcggcccacctcacctcacgatgatccgtcgagaggaccggaagacacacggacacccatgcgagcgtgacggcagtggttcgtccccctcgcacaccgtcattcgacccttaccctccggcttttaccggccggtttcgggttgatgggtgggggtccgatctcgtcctccgagggaatgggtttcagtcggtcgagtcgtcagtgcttcccccggggtagactggtgatgacctgtgttccggtgttaaggttggaaaggtctcaggttcatgggaccggtggaggagcgtaagaccttgagagccttccaatcatgctgaaggtgcccacgtcgacccgggagttctgaaggagcagaacacacgtgctggcgtcgattgtacgcgtgcctctcggggagtcaatccggaaacggggtggacgatggggagagccggtgtccgatctctggcggacgggtctggggggtgagggttctcctccgcgctttcacctccgtcgtaccggtacgatcggtacgatcagcggtgtcgggacgatcccaccggtggactccgtcgtaccgcgctcggacgccgtttcccctcgctggggcgcgggcccgaccggggagatctccatcacgacgagcactggcaggtagcgggtcaggctcaggaaacgggacgccttccaggtcgggcccgggtccacgcggacgccaccggcctcgacggagagcccgaacggcaggccggccacgtcgacgatcaccgtgttgacgttggcggaccgcgaggacgggggtgccgagtaactccattccccggggacgatccagcgccaccgcccggtctccgggtcgtacaccgccacgaaaccgacgctcaaaccgtggaccctcacctcgtacgccgggttggcggccgccgggatgggccacgcgaagtacgttccctgctctccctcgtgggtccggcaggtggtcaccacctccagggtacccagctgctcgtcgtaccctcccgtcccctccaccgggaggacgaaggtcagctcccgccaccggatcatcttgttcgggaacagggcctcgagcgcgtccatgtacggcgtactcccggagtgcaggttgtaggtcacccactcgatctgatccctgttacccggccaggtcacggtccggaccgacaccggctcgacctcgacctcaccgccccgctcgggcttccacttagccgtcacgagctccgcatcgctcggcacgagcaccttgatgggcactcgggtgctcccctcgagcccgtagccgaggacctcgaccgtcaggtgggcccggacggtgttctggtcggtgagcgtcagctcggtgcgctcggtgaggtggaccttggagaccgggctccaggcgtcggcgagcgcggacccaggtaggacgaggaggatcgccgcgagggccgcgccgagcacggtctttccccctcaccgagcgtcgtggttgcggtctagcggtcatcgcgtacgcgcacgcacagccgatgaaaactcgttaaattgattttccggagagaaccgaaaccaccgaaggcgcggagcctccgagacgtttccccggtggccgtcttcaggaggcacgctacctcgcggcggtgcatcgccggtaccggagttcaggcgagggaccggcgacgcccgccttgccacgctaacggggccagttatgttcccttaatgggtgtccgaccctgaaagtcgggttgagtgcacgcccgtacctctcgccttctgagacgcggtcttcggatacccttccggatcacctcgaccggcgatggtggaacggacgcgtgggccgagactggctctgtcggccgtaacggagcggattcccccatcatccatcccggtcgagggtacgacctgcggtaggcttgccgatgaaaccgcagcggacgggcgacccgacctcaggagccgagttggacagccattgtatgggagacagagtatgtccggacgacaagttatatatcacgacaccgtcgctctcctcccgcttccatacaacttgggagcatttaaggggatcacgtgccggggttggtcggatcgcacgtgcccataccccatgacccggtcgaacggatccgggcactccgcgtcctgagggaggtctaccgtcgtgggaagaagccgagtctcgaggtgacctatcggaccgtcaacgggagcacgtgcgggccgtactacgtcgcgagatggcgtcgcgactcccgacacaagcgcgggcgcacgctctacctgggcaaacccgagaacaagagtgtccggttcgtcgagtggttggtctcactggatcgtgaggaggtactcgagctcgcgcggcagctcatgaggaacctccgctcggtgctcaaaacactactcaccgaggtctcggacttaccatacaagaaagctcgacgaatactggcccgcgggctcgcgctagcattcgacgccagacccgcgggatctcccggaatccgggacgtgttggagaagctacccgatcgactcgagtccttcctaatcaggaccctcggaggatggcccgcccactactcgagctacctggggaaggtcatccactcccgcaggaaatccctcgacgggaaacacgagatccccgacgtgaaactcgaattagaacgatggaagctgcgacacggccggtaacgccggtgagaacgttcatcaccttcggttgctacccatgcggcactatctgacggaacacgatcgcccgggattagacggtcgttggtggttctgcagtccttcggggtaacaactgggaggaagtacagagagacctatccgtgcgtccatgtgagctgacggcggatcgtcgtgcccgctgttgtgtgtcggtcgtcaccttaggacgtcaggacgtcgatactcacctcgcgggagtcctaattcagctcctcggcgagcttccggatggtgtccgcggacacgggttcccgctcctcgagttccacctcttcccccttgtctagggcacgcagcccctccgcgatgaggtcgaggagctcgacctcgcgctggagctgcgggaacccgggcctgggaccgcctcctcgggtcctccggcagaccctggggtccccggcggggtaccccctcaccttggagaacacggcgtacccgaactcctcgcgggccctctcggcgagcttccgcagctcgtcctcgggaccgtccgcgatggccccgaagcaggtctccttgatcgtcacttcgggcggcgagttctcgaggagccactggacgagctccttcggcgagacgccggtaccgggggctagagcgaagtagcggctgacgttcaagggcaccacccggtcccccggagggccggcgctaagtatccttgtcggggtgacgccgttgtcgacggtcgtacgggcaccggcgacgatcgccaacgtcggtccggggttcgacgtgttcgggctggccgtcgacgggttccacgacgtcgtggaggcacacgaggcggacggcgtgaggatcgtcaccgaggacccgatcccgaccgatcccgagcgtaacacggcgggacgtgtggccctgaggatggtggaggagttcgacctgcccggggtgtccttggagatcaggaagggcgtcccgatggggggattgggtagcagcgcggcctcggcggtggcggcggcggtggctatcgaccgggagttcgaactggggctcgaggagtccgagctgctcaggttcgcggcggagggggagcgcgcggctgcgggggaaccccactacgacaacgtggccccgtgcctgctgggcggtttcgtgatctggcggttcgagcgggagtacgtgaggctggaggtgccgggagacctcaggttcgtgacggtgacgccgaccggggtgagggtgaccaccgaggaggccaggaaggccctcagggagcggccgccctcgctggacgacgtggtgaacaacctctcggcggtggcgctgatggtgcacgcgctccacgaggaggacgcggagacgttcgcgaggatggtcggatgggacaggatctcggaacccgtgcgtaagcggttcgtaccccggtacagggagctccgggagaccgcctacgggaccggagcgctggggttcgcgatcagcggggcgggaccgactgtcttcgccgtgtgctggcgcgaggacgccgaggacgtcaggacggcgctcgaggacgtgttggacgggaagtgcgtgtcggccgtgcaccgggtctcggacggggcggaagtggcttagcctctccgtcagcggcctggaacgtcctcaccgatcgggcggccgattagatcatcatccggagagggtcttccgacggttcacaccgtcgtggatcagcggcggcctgtgtcctcatcccttcggacggccgattagatcatcatcgtacccgcgaaccagccgcttccagccctccccctcgacgacttcttccgagtcatccgcacgaaaatacagcgcgcacccgcactcgaggtcgtgatcggagctcacccgctcctcgacgagctcgcagacgcgttcgaacagctcccgacggacgtccggatcgagactcctcagaaactcggatattagcccctcgtgacgcgccgcctcgaccgcgaggtcgggccggccgatctcgaccagccgggtcaccagggactcgcggcgcgcgtcggccaccttggcgtgcgtgttgtacgcgcccgccgcgagcttgagcagcttaccgggcatcccgaagatcaacacggcgtcgaaccgcttgacctctccgtccgccgggacaccggtcttcacggcctcgagcgccaggtcgtacctgccgtggcagttgacgatatcacgggagggtatcccgagtcgtcgcgcccggtccatggtcctgtacccggtgaccaggcaggggacgcgttcgacgtaccggagatcgcttcggatcgacccctcgatcgcctcctcggagttcgggtccaccaggcccttcgtccccaggatcgagatgcctccctctatcccgtgacggtgtgccagggtcttgcgggcgatctcctcgccgtccggcacctcgatcgtgaccctgagcccgactccgtaggagtcgacgaggtagcgcaggttgtcaacgatctgttcccgcacggcctcggagatcgcgggtttcccggagggtgtctcaccgacccccctacccgcgcgtatctcgacaccctcggaaccggtctcctcgacccgggcggcgatggtgacgcccgtagtgacgtccacgtggtcgtcgctcccgggtttcctcaccctggcttcggacgggtctccaccgacgcgtgagatccggacgcctataacggtccccaccgggaggcggacgcggacggtccgtaccgtcctgccctccaggagccggatggccgcggccttggcggcggcggtggcgcaggtccccgtggtgggtccgcgccggagcacccgggctccgtcggtcgtgatcaggccggtgcgtaccaggtaccgggccgtggggaggtcgacgtctagttctctcctcacgagctcgaggtctacggggatcccgcgtatcgggtcgaggaggtcgttcataccaggtcggccacctcctggggctcgacgacgcccttctcggtgatgatcgcgtcgatgagctccggtggcgtgacgtcgaacgccgggttgagggccggcacgtcctccggggccacccggacaccgcggacgttcttcacctcgtcctcggacctgtgctcgatcgggatgtcttcgccggtctcggtctcggggtcgatggtactggtgggagccgccacgtagaaaggtacgtcgtggcggtccgccagcacggcgatctggtaggtcccgatcttgttggcgacggacccgtccagggcgatgcggtccgcccccacgatgatcgcgtcgaccttaccgctcgccagcacgtaccccacggccgtgtcggctatcagcgtcaccggtatgccgtccctcgagagttcccaacaggtgagtcgtgccccctgctgcacgggacgcgtctcggtcgcgatgacctcgacctctttgctcatgttgaacaccgcggaccggacgacaccgagggccgtcccccagtccacgcaggcgagggctccggcgttgcagtgggtgagcaccgtgcactcgtcgggcagtagttcggccccatggtcgccgagctcccgattcacttccacgtcttcccggaggatccgctcggcctccttccgcgggtttttggcttcctccatcctctcgagcgcccagaagaggttgcgtgccgtcggacgtgtattacggagtcgttcgatggcctctccgtagtcctcgtcccgctcgtacgccacccacgcgcccaaggcggcgacggcgccgatgagaggtgcccctcggacgcgcatgttctcgatcgcttccgcggcgtcctcgtaggacgtgcattcacgccaaacctctcggtccggtagctccgtttggtccaggacctcgaaccgtgcctcgtcccagtacacccgcaacgtcaacgttttaaacgcggacacgggcttcacccctcccgatgaccggagcgggatgctgataaggtgactgagatgacgatcgggttatgaggggagggcgccgggagtcacgatgtgatcggggtgttaccattgttcatactggtcacctcaaacttcctgtctttcaaccggtacacggtcacgcgggaggagctgttcgagactggctataacctcgtgaccaagctgttgaaagatccgcctaggccgtaccataccgtcaaaatcagggtgaacgggaagaaggggaaggtactgacgcacgccggagaacccgtgctcttcgtttttgccggatacccaggcgtttctgaagatgctaaggtgttcgtggagatgaacggtaaggaggaagctatcaaacctggatccacggttaatttggactgggaggacccgaacgaggtactctcaaacgttaccgggttcttcgccgggagcaggtaccactacgagcagagtgtggtcctagccggagctagcctgaccctatccactgtactaccggaagatctcatcgaaaggctgaaggagctgggacctccgaagaagctgcccgaaagagcgggaggagaggagttgaaagtccggaggatgacctcctctgagggtatcttgagttccatcagacgactactcttgaggttccggcgtcagtaacgacgggcatcttctagcgaggagtactccactaaagtgcgcgtgggatacgtccgggtcgagataccgcgttcttcgaggagggccaccgggaccaatccaccgtacgccacgatacccaagcttctgggcgggagtgggattcccaagatttccccttcaaccttgggaacgtccacgatcccacggatgtcggctttctcgagctcgcgttcgacgtgttcgacgtcctccagcgccgcccacggtacgtacctgacgttggcggggactaacccggtaccggtttctagaacgcgttcgacctgggtcatccctttggcgacgaacacgtggagaggatccaccgtggatccttcgtactttatgtactcctgcatgcccagaggttcgccgtcctcgaggtaaagcagacctccgcagacgggtgtgaccgggataccccggttgatcagaacaccgtcaatggtgacggaacacaccgtgagcacggcgacctcgtcctcccccacctcgacgtcgtgatccgacagatcctctttaaccgccaccagcgggctgggcgagatgccagcacggtacgtctcgactactgcgtcgaggaagtcgtcgaggtgttccctcttcaccacggagatgttgcaaactaccttccctttcatgacctcgggatcgaaggagcaacggtacgccatctcctcaatgagagaaatgtacatacccacgcgttccgacgaggtttccgtcttcagcatcgtgaggccccattcggtgatctcggccccgacgaccctgtcgttcctccgaacccttcggatcagtcccctctcctccatcttctgaaggcggtaccgtatggaacgcgtgctgtacttctcaccgaaccgttcctcgatgagctcggcgattcgaccggagcccatgggtcggtccgcctcggcgagtatcttgaggatcatcacgtccagccggttcatttcgtttcaacccctgtaacgataaggtgggtaggaaaagaaggttccgggcttagtatacgatgaacttcttgatctcccacttggtgacgcgctcccggtactcgctccactcctcccacttcagctccagccactgctccacgatgtggtccgtgaacgcgctctgcacgacctcgtcctccttgaacgcctccagggcgtcgcggaggttctccggtaggtgctcgatgccgagttccttccgctcctcctcgctcatctcgtagaggttctcgttcaccgggtcgcccgggtcgatcttgttctcgatgccgtcgacacccgcgacggccatcgcggcgaaggctaggtacgggttgcatgccgggtccggcgagcggtactcgattcgcgtggccttaccccgcgcagccggtacacggatgaatgcgctcctgttcttcgggctccacgcgatgtacaccggagcctcgtaacccggcacgagtcgcttgtacgagttcacgagcgggttgcagacggcacacagcgcgtgggcgtgctccatgataccgccgatgtagtacagggcggtgtcagacaagtaatactggtcctcggcatccgggtcgtagaacaggttctccttaccttcgggatcccacagcgactggtgcacgtgcattccgttgccgttctcgccgtagatcggcttcggcatgaacgtcgcgatcagaccgtgcttcctggcgatggccttcacgatctgcttgaacgagatgacgttgtcggccgtggtcacggcgtccgcgaacttgaagtcgatctcgtgctgacccggaccgacctcgtgatggctcatctcgacctcgagaccgaattcctccatcgcgaagatgatctcacgccggatgtcctcggcgcggtccagcgggtagaagtcaaagtagccaccctcgtcgtgggcctccacttcacccgtctccgggtcctgcttgagcaggtagaactcacactcgggaccgcagtacatcatgtagcccttctcggcgagctcgttcatcacgcgcttcaggttgagtctcgggcagccctcgaacggcttgccctccggccagtaaacgtcgcaaattatcctcgcgaccttaccctccctcggcctccacggcagcacggcgaaggtgtccgggtcgggcatcgcgatcatgtccgactcctcgatgtcgacgaagccatcgatggacgaaccgtcgaagaggacaccctcgaccagcgcgtcctcgaggcgctccgcggggatcgcgaagttcttaacgaacccgtggatgtcgacgaactgaagcctgacgaacttgacgtccttactctcaacctgttccatcactttctcgaccttctcctcgttctccttctgacgcttcttgaaatcgaccgtgtatacctcgtcggccaaaggcgacacccccggaatggattttccggcaatcctgagctggtggcggccccgcccagggactttatagacgttttgcaacctccgaggcattcgaggggggtgaacatgttccctagaaccctgatacccttaatctccgccattctactcgctacgcccgcctgtgctaccgatgtcggggtattcgcgtggggaagcacgataaggtccgaaggcgtccaaaagttcacggacgatatcctcagcacgggctacaccgaggtggccgtattaatccggggggtcagcaccccgacgcgcgtcgacacgctctcggcagtgtactcccagatcaaagcgaggaacccgaacgtcaaggtatacgcctggatcgtggggttcgaacgtaaggacggctgggacaagccatgggatccggaggtacgtagggaaatccttgacgccgtgcggtcggcgttaccgtactgcgacgggataatactggacgattccttccggtacccgacgagcaaccccgtcaagcgcgagaaagccatgcaggccatcaccgacctcgtacgtgagatctcagaactcgcgcactcccacggtaaggcggtgtacttctgcctactaccggagaagccggagccgtactccatcgaccgagacgcgatcgcgacctacgtggacaagttcatcgtcgaggcttacaccgaggagtacggaagggacgacgagtggcccgtcagggtgtacaacctgtacgaacggctctatccgggtaaggtggcgatagcgctccacgagctgaacgagagtcgtctggcgcatcagctaacgctgctgaaggaggccggctgtccggacatatggctcttcaggtacggagaggtcaagaagatggggctcgtacgtgacgtcataaggtccatcacggggtccgcgagcggtacgtccttacagtggagtccggtggaaggcggacagttcgacctagcgggcctgctgctgactggactggtgctcgggacgttcggaggactagtactggccatcgtcaatccggagctgttgaactcgctgggacaagcggcgatcggaatcgcagagaccgcccaagaattgctccagggggcgttcgaagccgtctcgggagcactttcggggatacaggaaaaagtattaggagcgtcggcggagggggacctgggtcccatcatcggaatactcgcgcgagtggcgctggtgttcgtatggggatggttactggcgacactgctcagcatcatctgaaacgtgcttaacagacgatatgcgtgcgccaaaccgcgagacatgagcacttgagaccctcaagcctgccgatatcctgcgtacgagtgaactcccggagggcccgggcgacacgccgggaacatctcggacagttggacggacctcgaggagttccggccccgctcgtatccaccagcagatcgaccctatcacctaaggtccctttcaccttcctagcgacctccacgcaggtccacaaccagggcggtctgtaaagcccgacacgccaagctttctccagcacggtctccctatggaccgtggtggggcatatcgaaatcctagtgcagccggctaggtgggcatcgacgcaggacatatacgcgtccctgatggcctccgcctcggagaggaaggggagcttcagcatcacgtacgccttggggatccctccgtactcccttaccttcttcacggccttggcgaattcacggaaggaaaagcccttgttcatggacgcgcgcagctcgtcgtcactggtttccaacccgattcccacctcgaaggacttcccgtccaagacctccgtgatcaactccaaccgctcgtccgtgatgaactcggggcgagattcgaaagatacctccgtcaccagctcgttctcggcgagccgacctagtatctcccgaacggcttcgtcgggcacttcctcagggtctaagaagctacccgacgtgaacagtttgactccatgcggtgagtccggccggtgtcgggaataagctcgctcgaactggcgtatcaggagctccggcggcaccctcgtacccgcgccctcgagcgggtaggagcagaacacgcatcctccggtctcgtggaaccatcggcagccccgagtggacagcacgatcactacactacgatccgctcccgtgactcggtcgggttgcttccacgccgccacgtaccggtcgggccgtcctcggaaccgcacggtaaacacccggaccgagtcagtgccgggctcaatcttcatccacaggatccgcgacgcaggcctttcatcacgcccccggtagcccgaacgatccatcctagttgaatgttgtgcgccgggaacgggggtaaggaattgccacgtgctaaggtcttcgaaggaggtagcttagtctccaaggattacgaggacctgaagcgtcggtacttcggaacggagcacggtaacgtgcttttcctggatcctttcgaaactgtgtacctgacggagaagggtgagatcgacccggagacgccggaaggcgaacccatgagtgtggaagaactgctttctttcttcgagcgaagaaggccggggtttcgggcaggatacgtcgtttatcgggatctcaccgagcggggatacgtggtgaagtccgggtttaagtacggaggtaggttccgggtgtacgaggaggacccggaccgggaacactctaaatacgtggtgagagtggtcgagccggacacggaactgtctacccgtgacgtactgcgggccacacgtttggcacattccgtccggaaagacttcgtcctagccgtcgttgaggacgtcgaagaaccacgcatcgagtacgtgatgtggcggtggaagaggctgtaagggggacactcccatggccgagcagaagccgtactacggagcctggccgtgtcacccacgagatctagtcgaggagggagtgaccaccagcgcccggcgggcgagaatagtcctcaggaagtacgtcctgggacagagtgaggaggaaatagccgaggaagaggacatctcactgaagtccgtgaagtaccacctagagaaggccgaggaggaaggcctcatcgattacgtgaaggagaagttcgtggagagcgagtgagcgggtgtgaactcctatacccgaaaccctgatcgatccctgggacgtagaagaagtcgattacgaacgccttaccgaggagttcggcattcgaccgatcgacgagaaagtccgagagttactaccacggcgtttcccactgctagaccgtggcatagtcttcgggcaccgcgattacgactccttcctcaaagattacaacgacggcaaactcgtcagcgtcctcagcggaatgatgcccagcggccgaatgcacctcggccacaagacggtcgtcgatcaactagtgttttaccagcaggagatggacgtcaaggtgtacgttcccatcgccgacctggaggcacaccatgcccggaacatggacctagatcgggcacacaggatcgccgtcgaagagtacgtcctcaactacgccgcgttgggtctcgacctggacccggatcgatgtgagatctacctccaatccgagaggaagacggtccagcggatggcactgttgctagcgggccgactcacgtggaacaccgtgaaaaacacgtacgggttcaccggcgagaccaacatgggccacgctttcgcgccgatcgtccaagccgccgatatactacacccacaggagatcgagggaccacaccgggttctcgtacccgtaggcgtcgatcaggaccctcacctccggttgactcgggatatagcggaaaaggaggatctgatcaagccggccagcacgtaccacaggttcatgaccggactgacgggaggcaaaatgtccagtagtaaacccaacaccgcgatattcctcaccgacgatcccgagacggcgaaagaaaaggtgtggaacgcgaagaccggtggaggagcgacgctcgaggaacatcgcgagcacggtggcaaccccgacgagtgcgtggtgtacgaactcatggtgtaccatctggccgaccgtatcggaggggacgaaaagctacgggagatccggaagaagtgtcgggaaggggacatcatctgcggtgagtgcaaacggatggtaggagaggcgctagcggagatactggaagaactggagcgtcgccgtgaagacgttcgagacgagctcccggacctactatcacagcacccggacgcgcccgaagtaccggaggactggtaggatgattccaccgttccaagctttagtaacgtgtcccgccgggttcgaattccgttgtgtcgaagagctcgaggatatactcaaagagcaggacccgtacgcggaggcggaacctacgtacttcaaaggcgtcgtagtggtgcgatcggatctagaaccggaagagatcgtcgaaatgatgaaagatgcggacacggattgggtagctaagatcgtccccatccaccgaaccgtacgcgccgacctggacgtgatgaaacgcacggccacgatcctagcgcgacggaagctggacgaaaacacgtcgttcgcagtacgatgccgaaagcggggccaaccaccgttcggacagcgagaggtcgaggtggaggtaggtgcggcggtacaggaggcgaccggcgcccccgtggacttggagaatcccgactactacgtctggatcgaggtactacaggataccgccgggatctcagtggtccctccggatctcatcgtcagcaaagaagtcaagcgagtacgcaaatggagtcccgggatgagacctatctccagagctcagctcaaactcagggagctactgaagcgccatccgtacatcgtacgggaaggttccgacgtgatcgacctcggggccgcaccgggtggttggagctacgaactggcgagaagagtagagccagggacagtatacgccgtagatccgggggacttacacccgaaggttctcaagctcgacaacgtcgtacacctcaagaaaagggccgaagagctaaccgaggacgacatcgagggtcgtatcaggttggtcacgagcgatctcaacaggatccacaccgaagccacggaggtcactctcagcgtcgcggacgaattcctcgagcctgggggattcatagtacagacggtgaagctggccgttgacccgtctaccggggaatacgccgcgccggacgtggagacggcggtctcagaagtcgaactcgaatatgagcgccgcgggtacgagatactggctatcgagcgcttgaaacggaatacacccaacgagcggactctagtagctcggaaggtgtgatcagcgttccggccgctgtttcgaaggatctcacggcgtgacagctccgtagcgacagcctcgagaagttgggcccgcgaggcctgactcccgctcgacccgagcgtcatcgtcctgtactctcctatctgcccttaattcctagttatccggtcggcgtcgtgagtcggggactgatcggattcgactccgcttgaagtcgccggtgacacgggggtcatgcgcctgctgaaagccggtgacaggatccaagggcctggatgggagggaaaggtcacggcagtgttggacgtggacggatgtcgggtagtgatcacgagctcgaaccccgagaacgtgccgaagcgcgtccgaggtggcggaaccgtctgtgagctcgcgttccatgaccccgtcggtgggttcgcggcatactgggtggaaccggatcactcggaggcaaccgatgtaggatcaccggaagagggaacgtgtgccgttcatatcgggaacaggtggatactagccgaggtgttggaggtaggtcgacgagaattgagcatcagaatcccgaacgtggcgatccccggacctggcgacgcaggcgccccggtagcgcaaaacgagcgggtagtgggcatgctctacatgtacttcctggaggacgattgcgtgggtcgcgctgtccggatggacgtgatcgaagagcgaaccgagcgagctctgaagcgcctgagggggcgtcaacgtgcccgtagtattcgaccttgaaggcccgctgtccccgatggaccacgcttacgaggtcatggcgcgctgcgttcccaacggtcgggagatcttcgaggtcatcagtttctacgacgatgtggtgtacttcgaggagcagcgggagggatacgagccggggaccacgttggcactcatcgtcccgttcctagtggttcacggcgtcactgaagacgaccttcgaagggtttcggaagatgctacactcacccccggtgctcgggagacgatgagggaactcgatgcgaccccgttcgtagcttccacgagttacgagcagcatgccatgcgtatcgccggcctcgtcggcatcccacgcggacacgtgtactgcacggagatgccgctagatgacgctccggaaccctcagaagaggagcggcggctcgtgctcgaaatggagcgggaaatactgaggaagttctacccgccgagcgatgccgacaaagaggagctcgtcgagagtgtcgacgacttcttcgggaggctctccgagaccgagctcggggagttctgctctaaaatagaggtagtaggcggatctcggaaggcgagggtcgtagaagaggtcgtggacttagaggatgccgatgtttccgagatcgcgtgcgtgggtgacagcataacggacgtggacatgttgaagttcgtgaggaaacggggcggactggcggtagctttcaacgggaacgagtactgcatacccgaagcggacgttgccgtcgcggcaccgtcgctgtccgccgtattgcccatcctcgagacgttcttcgaggaagggaaggacgaagccatggaacttgcggaggagttcgaaccggaaggggaagcgcgagtactgaacgtgaaccgggcacgacagcgcgagcttgaagagttcattaggtactccgaggcgatgagagaacgcgtacgcggcgaagccggcaagctcgggtgattcctttcagccaccctcgggaccttcggcgtccgagcggtaccttcgggcccgctccaagtaataccgggccaatcgtgcgcggaactccctcaagttcaacggcttaggccgatgatcttccattacgatcgccctgtcggcagcggcggtgaagtcgtcgagaacgcctgtagccgcgactatcgtgacgccccgggatgtgatctcgtcacgcacctccacgagagtgcggataccttcgagttctttggtaagtactcccggcaccagtaggttcacggcggccttgtcctcgtcgatgaagagtatcttggctccttcctccagggcccgctggatctccgcggccatcttcatcgaaccgctggcgaggccacggacgttttcaggtgtcccctcgtatccgggcggtaattcccggaaaaacagactcacgtcctcaccgttcatcctcttgatgcccgcctcagccttggcggtgcgccgaaccgtgatcacgtactcacgaccgtctcctggtgcatgatcgtcttgacccgcctccacggcgttgaccagggtagtcttgccctgtgcgttggctccggcgatggcgaacagttctccctcgtaaatcggtaggaagcgctttcgctcaccggttcgggggagctcgatttccagcgggactaggtccgcatcggggtcctcaggaacctcgaacgggatgtgaggttcgggcttgggaccggctatgcggtgatgtcgacggacgtccgtcaacctgcgagcgggtcgcgccccgtctcctatcaaggccactactcgcttccctcgatgttcgatctcacctctctccagccgctcccgaagctctcgctgatcgagaaccacgtcacacgttcggaggatttccttccggggaatctcccgtacgacttctcgaagcgcgtccagtgctgcgtacacaccgtccagaacacgttcctccgaccaatcgggcgggaacaacatccgcaccgttaacaggacttcccgtgaccggcgcagaacacggttagacttccccggcatccaaaggggaggagtgcgaaagccgtggagtcggacgaccgtgcagggctcggtgagtttccggacctttttatgatccaggagcttcccggacaacgggtagaggtccggttcctcgcgcgaccgtcgtttgatctcctcgatgatggggtgagccgccgcgtctccggcacctttcggcactttcttgaaatcacgtcgagacaccctaacgggcagtactacgcgcacggcgtccgatccgcggaccgcataccaccggcgtcccctggacctgtcggtcatccgcttaggacaccatcgcacatccgtcggcaactgcaacgtccggattttctcctcgagtcccctcataaacgggtcatcccatgaacaacagcgtcttactctccagctccgctttccctcggctgaacagcttcataccctcgcgcatcatgcgataggccgcattaacgtggcggaacgcctctccgacatccccttcgtcggccgcctggacacccagcttgaactcctttagagccatcctgtagtgactaacgccctcgtgcatcagcttcagtgactcttttatctcgggatcggccgtcgctccgatcatgtcaagggtcctatcgaggtgatcgacggctgcgtctatcgcatcgacggccctggcgtaatggacgtacgctccgtgaaggtcttccagtattctgggggcgttaacggagagggctaagggtccggcactcctagccgcgttgacggtggcagatacctcctccattagctcgtcacctttcttcttctcctctaaggccttgtgtgctagctccgtagctgcgttcagctccctccatgcttccggtaagtccgcaagcacgtcccactggaccgaagccgcgagcaacgccaggcataagacggacgccgccgcgtagatcctcgcgttcacgtcggatccccctctaaatcgagaccaggagggctccgaccaatcctcctatcacagtcgcccacagcgccgccggtccggaatgaatccacccgcacacgatctccgcgacgagagcgctcaaagatcccaaaatgaaccctgccacgggcaccgatacatcaccgagtgctgagcgcgtaaccttcaggagcgtcggttcgggagtactttccccaccgcgcggctccctgaacctcagcttgaaaaccacgtagtcgaggacgtcggactccttggtcggatcccgaagcacggccacgaggtagtactcatcacctatgctcagcgggttaggtccttctccgaccttgacctcgagatcggcgcggaggatgctgttaggctcgggatgatcgatctcgacccctttctcagggagcttcaggtcgtacttgggcggcaccatcaaccacgacgggaaatagagctccacagcgagccgctccgggggatgcggaccggtattgaactccaccgtcacggtgaactcacctttcgtcgggacctcggggacgtgcttcagacccagggtctcgagccgtttcgtgtcgataccttgaccgaagcaggtggcctcgtgcccctcgatgtaaacgttgagaatgtgcggccggtcctcgtcgacggggtctaagcgttcggcggctgcgacggccatcagggtcgtggaaagtacgagcaacgttaacgtccgatacatgatggctcccccggggagtgggtaacgtgtcgcgcaaaacggaacttgaagaaatttttagccgcatgttgcatgatccgaacgacgacccctcggagtacgtgatctacgtcatcgatcgtggatcctcgagtgggctccgtcggatctggggggacgagatccaggacgttaaaaggggtttcttagtactgtggaacgcggagattccagtacatcgggtaatccgggtagagcgcggtggtagggtcatctgggaacgcgggcggcgagcccgtggtcgtcgataaagggcagagccgccacggcccctatccgcccgcgctctccgtccccgatcgagacgacctcgatctcgcatatctccaccacttcatcgacctcctcccggctaacgatccgacgtttggcggcgttcccgaggtctctcagttccctcggaaactctagcctgtcccagaacgccgcacaggtgtgatcggaaaaggacacttccttcagcatcctcaggaactccctcttgaccctctctacgcgcttcgtcggcactccgagctccacgaccaccgccgcacagtttcgagttcggtggggtgtcttagggtacaactgcactgtgacgtgtcgggaatagaagacccccgcttcgtcctccaagcggcggcagatcacgtcaactgccgaccaagtggcgccttcctcctcggtatccgtgtcatcgactccgatcaccagacgtcgtagctccggcgttaccaccgtcgcccgacctaggcgggatcctcctccctcctcgtgaatctcgacccgggaaacaccctcggcgcatccccgagatagagcggcgccgacaccagctccggcgagccccgcgtgagtcacccggacctcgccgtctcgtacctctacactctccacacccgcggcccgtacactcggttccaagtccagcgaggcttccccgaccctcaacaagaaaaagtggcgtttgccctccctccaggccttctctacgagtgggctggtagcttcgtagttcctgacaacccactcggcgccgacgggtgttggatggtcctcgatcaagagcacgcgttccctgtcctcgtcggtgagcgtggcgatcctctcgtacatggtcacccaacctttctccgaacacttacgacggacctcctctggacttagcgacaccaacgtgatcacccaccgaggggatcgtgagttggccgagaccatcgtgcggaagttcgacccgaacaagtgggtgttagtgcccaccagacacgccttagaacggctcaggaagagggaactgtcgccgtcagccgacgtccccgaagccgtccacgcactcaggaggttagcctcgaccactaaggtactgataaaaaacgatgtatgggtagcggtggggaccgaaaggacactagtactttccgaaatgagaactatgtcgctagagaagtaccaggacgagctgaagcgtcatctgagcagattacaccccacctacaccgtatacgtgatcacggcggaaggatgtcgcccgacctcggcaggccagctggatgtcgacgatctggcgaccgagttcgagtacgcccgattctcgggagaagcgcgtacgttggtgctcgcccgagagggcgagaaggcgttagcagtcgttacggtgcgtccaccgcgaaagaaggagagaaagctcatcgaatgacccgctcgagcagctcggccacgagcttaccttctcgctcgtcccgggcggtggtcaccacgaaaatctcctgggtagccgccccttcggagaggagcagcttcacgttaccactgtcatcgacccgcgacaccttcagtcgaactcctccacctccccgcgatcccttggcccctatacgacccgggatcaccctcttgacgtagggcacggaagccaccttgagtacgagttccctcccccgccgaccaccgatgatcgtcgagtgactaccgcctaacttacgctccgggggttcttcgacgcggtccagccgccggtcggcccgaagctcggcctgcagggaccttacgacgtcgtcgaaatcgtccctcaccgtgcggacagtcactccggatattcgctctacgacgtcaactatccacggtggggtgcggacagccgtcgcggcgcgtggtgcggctgagtggagaagctcccctagcctctccacaaggttgcgaagcatgatcccgtccggatctccttgaaacgactggtggattgtgtgaacgtcgctctcgttgacgaacgctacgacgtacctgacatcctccgggtagacttgaaatgcggcgacttcgaaggacggctccccgcaacggggacatttaagaggtaattcgacggaatatccacaacgccgacacctcggcacgttacccaccctcgcactgggggatgttctgagctatgatcatggagatacttaataggcacaaggagaagttggtgaaacttagggtgctcagctacggcgaccgtatgatactctcagctcagttctcggcgaacgatttcgacgaggcgtacgagatgttgcaggagatcatggaagaagagcctgaggtcgtttccctggactcggacaggaagcagggctacgcggtgacgttgatggaggacgttaccgaagagtaccaagagatccgggagcgcgtccacgaactcatgcgtgagctcgtagagggaggggaagggaaggaggagttcccactcccgattttcgaagcttagcgacctaagagcctgtgcgctttacccaaatgtcccgccgccagtgcagctacgagtgacagctcacctgccaagaccgcggcggcgaccacttcggcgaactctttagcgttgacaccgggtgggttccctccaccagccacgccgaggatttccagacactcgcgctgtgtctccaccccggtaccccctccaaccgtccctacgttcaagctgggaatcgtcacactagcgtacaggtcgccgtcctccgtaacctccatcgtggtgtacccagtggatccatcgacagcatgcgcctcgtcctggcctgtagcgatgaaaatagcggccacaatgttcgcgtgatgcgcgttgaacccgatgttaccggcggccgcggagcctaccaggttcttcctgtaattgacctcggccatggcttccggggtagtcttcagcttctcctcgactatatcgcgcgggacttcgacctcggccaccaccgtccgacctcgacccagcacgttgttgagccacgagggtttcttgtccacacaaacgttcccgctcgccgaaacgcacttcgcgtccggatacttctcctcgatccagttcacggcttcctcagtggcgatagtgaccatgttcatacccattgcgtccttcgtgtcgaactcgaaccggaggaacacgtgcctaccgaccacgaactcctgaatatcgagtagctcaccgtgacgtgtggtactctcggccacctctttgatatcgtcgaagtgcttacgtacccactcacagaactccaacgctttacgagcggacggcagtttgaacacaggagcacgcgtcattccgtctctcacgatcctcacgtgggcaccgcctgaatcggtaatagtcgaacagccacggttgacggaggccaccaacgctccctccgtcgtcgcgagcggtacgtagtattccccctcggcgtactccccgtgcactaacagcgggccggcgataccgaccggcacctggacggctccgatcatgttctcgatgttcttgtccatcgcacggttcgcgtcgatggtgtacttgccgagatgctcgagcttcgcaccggtcaaccgctccagcgcacgacgtcgaacttccgtggccacctcactgtcaccgtcggtgtacttctccacctcgtggaacttgatctcgccttttactaccttgctcacgagctcctcaatcttcttctcgtccacgaaggacagcccccgacggacactcgaagagggaacctaaaagcagctcgaagcgtacttaggttcgacaccggttctcgcgagctccgctacgatagtcttagcgatctccacgagctcatcgcgtaacaccagaagccgatcaccgtcgggataatccagtacgtacactcgacgggaatccaacggaaactctagcgccagggcgaagggttcgcggccgtgcctcaggagcgagactatgatggcgtcctcacgcagctcgaccttcgccagcagccgacctgagcccgccgtgtgtccctgagctcgcgccccgcggagcaaagccatggcgtccgccaagtgacgggaaactaaacgccgatacaaccgcagaggtcccgtccgccggaccactctctacctcacacctgagctcacgacggagacccggaccgaatctgttgggcactacgaccgcggccctgtcatcccgtgttacgtgaacgtacgcgagcactcgaccacgaattacgcggatagtcccgtggaaagtcgcccagtgagcgttacggacgagattttgggccatacgccgataataccacaagcccatctccttaatatcacgagtcccggccgacgaaaaagactgcgggttagaggagggcgtaaatccctagggaaatcaacagcatgtacgacgccgcaccgcgaacggagaaccctgcagcgccgaagtggcccgacttaagctcttccgcacggactgcgagggctaggatcccggtcagcagaccagagactgctccaacgggacggagtatcggccataggatggagagagagcatgaggcggccgctatgacgccgaggatgacagccagtctgagcgggagagatcgacggatcatagcgggcatagcgaattcaattgcaacgccggcggagagtcccgcgagaattatctcgcttatagccaaaccacatccacacccggatccgtgattagcttgagaaactttgaagctccgacgactttgacaccatccaggagatcgtcggaagtgatacccctggcttgaatgcttaattcacaagcgcatgcctcgacgtttctcaggacttcccgggccttatctatcagcggaggaaattctggatgtcggattctttcaacttctcgctcaacgagcacggtgacaccgtccatgaagccgaagattacgacgtccaaatccatcgccaacgctgcctccgacattaggaacgtcgcgtacgcacgctccggattagcgacgccggtactttgtgctatcataaccgaatccgtgtcggtcgacggtaatgatccggcacacgtcctaacggtaccgtcggtcgcggtactatcggtctcgacgccaccgacgcggatcagcatgcgtatgtctccatccgtttcttcaaccttcaacacctcatgtcctccatcctgaactagttcccttatgtcgttggcaataccctccgagtcgacgataacttccagcacctgtccgggctccatttccttgagttcttccgccaccattacggacggcccaggacaggccgcaccacgcacgtcaagccgccgatcgggcttcatgattgtgtcccctgtgcgattgttcgcgattgtcgatcaaacgagaacaatcgttggaggcaatttaagttttccgatcccctggtccgacgacataacagtgtgaaaaagtgtccctggaccgtgggaccccctctcatcccggcgcctcgcggcgtcgagggggccccgccggctctgtaccgggggtccgtaacggacgctcatcgggtcggcttcggccgcctgacgtccgtccctggaaggaatgagcgtgaagagcctccgtcggcgccgcaatcatcacgtgtcaggctcgggcaagagtcttcatcggctgaaccgtcgacgatggcgtcggatttgaagatctcgctcgagcgtcacgacggatcgaccgtggaaaggggccctccgacctcagggacggaggatgtcgatcttcccctcttcaacggcctcgatcgctctctccatcagtttcttcgcgaggtacgccgaagactcacgggcgacgatcgggagcttccgtccttcgacttcgagctcccctaggtcgacctcgaccgccggacagaactcgtgacaataaccgcagtggaaacagtcgccggtccggaggtcaccgtacggatacgggcatttctcctcgagtcggcacgggtcgcagttctcgcagcggtcggggttccagcgaaccgtctcctgtacccacacgtcggcgtacgtggtctccgcgatgggcgtcctgtcggagagcttaacgaccggcaggacggcgtcggagtgatcgcgctccaggaacgggagcgtctcctcggtgaccgcgatcaccgaagctacgccggctatgttctccggtcccgcggacgtccggtactcacccatgaaggtgggatcacactcggtgaggttcgcgtggagtgttaagttcgggcgttctcgggtgctccgagtgcccttccccgtgatcaccccgggagccccgcaaaacagcacacgtcggccgggtcgatggagccggagtttcggatcgtgctccagggggttgtacccaccgcatccgctgaaggaggcctccccaggttccagaggtctcggcgcgaagatcgtcgacgcgggtcgttcgccatcgttgaatatcgcggagtagttgcggaaacacgcacgggtggacgcgatcatcgcccgttccagctcttctgggccgatcgtcgcttcgtactcacgaccgtcgtccgctacggcgatgacatcgaactcgttaccctccgctacggtacggagcaaataggccccggaaacgtccccgtgagccgtggccgggaccacacattcgacgagtccgaggcgctcgttagggcacggacctacgggcaatcttatgccttctaagtacacctcctcgaaccggcgcacttcaccgggctcagccacgtggaaggacaggatcccgtagacaccactcatcaacccgacggtggcacaagtgacggcatcgacggatcgacgctcaccttcggtcatgtcccagaactcgtcgatacggacgacggtaggcacgcccgatccccccgagtctgccggaccgccgtatctcgggcatgtactaagttaccggaaccccgctccgggcgagtagcgctcttcgatgggatccaggccgtggtcgttaggctctcgcggaaagaccgtcgcgaaggtattcacaccgtcggaacggcggacggtgggaaagtggcggaataaagaggaggggttgttacagaaggaaacgacgccatgtcgaccgaacggtaccgatactgtcgtaactcgtgagaacgaaacggtgtaggtatcgcaccgacgatcgaaggtctaacggagccagtgggcacgctccgctatcacgtacccatcgtcggacctgggtgcgttctcgagcattttcttcttgaactcccgatcacaccgcggctcgtcgtcttcacggaacttgcgtgacccctcggacgtcgtccacgtctcgtcctccgcgtcgacgtcttctaaccgttccgcgaactcttccagcaactccatagtttcccttaggatatccaagacatcgacatcgtcacggtcggaggccagagacaggtacgtgtcgatctcgaggagttgctccagctccctttccttcataacgagacccccagcaactctccggaccgcgcgacgagttcgtcgtccaggtaaagctcgaactccttaataaccgcatcgagatgcacccgtgagcttactcgcccgctaaacgtgctgttgtccccgaaccccatgtggactgtcccgtagaccttctcgtcctccagtaccacgccgcacagcttcgccccggggttggtgcccactcccagctcgcacagcatttctccgttctcgatccggcggatcagccggacgaactcgagatcctcccgcgagacttcgaccactcgaccctccgagatctcgagctccagaggctcatcaaggattccatccggtgccacgctaccgtcgatacggacgcacccttccgccgacccttcgatcggtgctacgaaagcctctccggccgggaggttaccgaattccccgggatcccgcaggttcccgtcgtccgccaacgcctcccgtccaccgatgtccatcacgagctcgcccgccggggtcaccagacgcacttcagaggcctcagtgaggagttcagcgagttctcgggacaaacgcctcagctcctcgtaatcgacgtcgatagcacgctccgcgatttcacgtgtgagttcgggcatcgatgccaccctagccccagcctcgcaggcccgtcgccgggcctccgtgtgggatatcgaccaagaggtgacggcggcgacggcgtcggagctcctcatcatggccgcgacgtgatccgggggctcctcgccgtgggtttccctgggatcgacgacgactagtgctcgatccgtcccctcggcggcctcgaacagctcgcggcctagttcctccatctcgggatcggtcaacaccaggaagcgctcgccttcggagagtctcaggcactctcggacgacccgttcagcccagcccaaaccgaccacccgcgtgacatcacacctctgaaaactgagctaccgcatctgcgcggtcccgggccggtgaagacggacgacgtcacgatgtgcggagaaggtgttacaatggcttcatctcatgagctagaggcgacatggcatctccgatcgatagaccgtgtctttcgtacaccgaccaactgttaggcgtgaaagggaagcccgacgatcctggtatcacctcacaggcgagccgggcccacgtcagggtggccctcacggcgccccatacccgcctcccgggtcaacgcctccggcttttcgagcattttcacgacgttaagcgcgtgttcttccgccctcttcaccgccagctcgtggagctcccgttcgtcttccgcctcgtcctcgtgcacgaacacctcgatgatgtgcgtgttggtgagcagctgcgccaatatcagccccatagaggcgaccatcgcgcactgtttgtcgatctcggtgggaccgggcataccgaaggccatgaccagatcgcaaccttcctcctcgatcagtcgcttgcaagccaccggcagatcctttatcccgggtaccgtgtatctgggagtctcgaccccgggtaggtgctctttcaagaccttctccgcgacggaggccatgtcgacccgggcgaaggtcgtgtccgccagtccgactttatatcgggtcaccggtcatcaccccaagcttcggaccgagaggggtcgggtttgagaaccttggaagcgtcgaggcgtaagacggcgttcgcgcaggcactcagcgcgcaaagggtccccctacccgtacccgcgggagtgactacctccgggtactcctccaccttgagccggacgccaccctccgtttcggtcagacgctggagcaccacgttccccagtgcgcttatgggcttacccacccaacagtgcttcaagggacattcgtcacagtaggctcggagcaatcgcttggagcgttccgacccgtacccggccttcaactcagcccggacgatcgcgtaggccacacagcatccccggttggtgatactccggttcgccagcttaagggtcgcgaaggctatcccgcgacggaccctcacgctgttcacgacgccgtcctcggccttcactttacccgtgttgggagcgtcggcgagctcacgcttcagctcgcggtacacctggggatgccgcaccgccgccaaggccagtgcgcaggccggacagtaggaaacgtaatccgatttcgagccgtcatagcgtatttccacctcggaaccgagaccgcgacgtcgaactattacggtaccccctcctccgaggataattcgagctgcgactctgtcgaccgtcagcacccttccatagccgaatacccgcgccagccgtctcatgtcgcgctccggagtgaggacttcggagagcctttcttcccacccttccgggtagaccccagattttatcagagactcgagtatcgccggcgcccaggtgacgtcgcgaccttcggtcaccgacccgtccggaccgataaggcgggctctcacacccagccgctcctcgaggcactccaccctatatcccgaccacgataggacctccagggtagcgtgtgcgataccgcacgctccctctctcggatcgagaacgcgttcaatttggttgcggatcccctccaacaggcataccacctcttcgggggatgtaccatgttcgacccgaaaaagttcgtcgaagaggctatcgaggagttacgccgggagataggggataggaaagccatcatcgccgtatccggcggcgtcgatagcaccaccgccgccgttttaacacatcgggccatcgggagccacctggtgtgcgtgttcgtcgatcacggtttcatgcgcaagggcgagccggagcgcatccgcgagctactggaagaagaactgggtttgaacctccggttcgtcgaagccgccgaggagttcttcgaggcactccgaggggtcaccgatcccgaggagaagaggaaaatcatcggagagaagttcatcgaagtgttcgagcggatagcggaggaggaagaagctgaagtgctcgttcaaggtacgatcgcacccgatatcatcgagtccgagcgtggaatcaagtcccaccacaacgtcggtggactgcccgaaaagctgaacctcgacgtcgtggaaccacttcgggacctatacaaggatgaggtgagggaagtggctcgctacctaggaatacccgatgaaatcgtggagcgcatgccgttccccggccccggtctcgcagttcgagtgctcggggaggtaacgcctgagaaggtcgagatcgtgcgtgaggcgaacgctatcgtggaagaagaggtcgagaaggccgtcgaagaggggaagatgtcgaagccgtggcaggccttcgctgcactcctggactgcaaggccaccggagtgaaaggtgacgagcgggactacggatgggtcatcgccgttcggatcgtcgaatcgatcgacgcgatgatagcggacgtacccgaggttccgtgggaggtcctccgcaacattcaggaccggatcaccagcgaggtacctgaggtaaccagagttttgttcgacataacccctaaaccccctgcaacgatcgagttcgagtgagggggacgcgcgttggctttcgtcgtcatcccctcggtcgatgtagtcgaggggaagtgtgtgcagcttgtcgaaggagatccggaacggaggacgttcgagtccgatgaccccgtggaaaccgcgcaccagtggtccgagtttttcccctggattcacgtggtggacgtcgacgcggcacgcggtgagggggataactcggatatcatcggacggatctgcgaggaggtcgacgccaaggtgcaggtgggtggcgggatccgttccgccgaacgcgcggaagagctcatcgagctgggtgccgatcgtctgatagtgggaaccgtggcgttcaccgataaggatgatttctcgaagatcgtcgacgtgtgtcacgatcacggtatcgaggtattcgtggcactggacgtcaacgagaaccatgaggtgctagtcagcgggtggaaggaggacgcgggagtcaccctggaagacgccatagagcgcttcaacgaagttgccgacgggtatctgaccaccgcggtgcacgtcgagggtaaggaaatgggtatcgacgaaaaagtcgttgagaagtcgaccggtgccacggatctccccgtgttgtacgccggtggaatagcttcgatcaaggacgtgaagcgggccaaggaggccggagcgtacggggtagtgatcgggaccgccctgtaccacggggacatcgatcccgtggcactacttgatctcatggaggaggattagggtatcatcctctcgatggggaggacgatgataccttctgcacccaactctttggccctgagtacgacctccgacacgtcctcctcgttcactaccgcgtagacctcgaccatgtcctcgtccccgtatatttccgacaccgtgggacctgtcacacccggcaacagctcgtggaactcctccaaccgctctcgaggtacgttcatcatgacgaggcactttccatcggcgttgagaacacccttcaacgacaggtaaactcgccggatcacctcaccgtccgtcgcgtcgggattggcgatcaaccgtgcggaggtctccagcagttcgtcaacaacacgaagcctgttgaccttgagcgtagtccccgtgctgcacaggtccacgatcgcgtccgcgactcctatcctcggcatgatctcggtggctcctgacacctggatgatctccacgtccacaccgacgtcctcgaagtactgccgggcgatgttggggaactccgtggcgacggtaccaccgtcgaggtcttccggggacttcacatccgactcttcgggtaccgcgagcaccagccgcgcccgaccgaaccgtagatcgagtagctccttcacctccgccccggcctccacgataaggtcgtatccagtgatcccgagttgcgccactccctcttccactagccgagggatatccgcggccctgacgaacatgacctcgatatcggggtccgtggttctggccttgagacggcgtcccagaggctcctctacgccgattcccgcgcgctcgaggagcttgagcgccggctcgtgtaggcgtcctttgttgggtaccgctacggttatcacttgcgccctccgtcgacgtcccagccgcaggatataacggtacccggggacctcggacttgaggctcgcgatactaggaggcatcgcggtaactccggagcgcgtgatcgaagacgccggaattctgatcgacgaagacggccggatctcgttcgtggacacccgagaacagctcgaggagtgtgaagactgggaggacgaaatagagctcggagagaaggacgttatcatgccgggcttgatcaacactcacacacacggtcccatgacgctgtttcgaggcgtcgccgatgatatgccactgatgaagtggttgagggaagagatatggccactagaggagcgcctcgacgccgagaagtgccgatggggagcggcgctcgcggctatggaggccctcaagtccggcactacctgtctcgccgacatgtacttcttcatggacgccgtagccgaggcctacgccgaagtcggcatccgcgcggtgatctcccacggcatgattgacctcggcgaggaggataagcgggaggaggagctgaaagagtcgaaacgcgtgtaccgcaagtgccaagggatggaaggactcatcgagttctcgctaggaccgcatgccccctacacatgctcggaggagttgctcaaggaggtccggcgcttagcggacgagtggggcgttaaaattcagatccacgtggccgaaactgaggacgaggtaaaagaggtgaaacggaagcacgggaagcgaccggtagagtacctggacgaaatcggactgcttggtgacgacgttatagccgcccactgcgtgtggctcgatgataaagaaattgaaatattatcgaagagaggagtaatagtctcacacaatccaatcagtaacatgaagttggcttcaggtatcagccccgtacctgaaatgctcgagagaggcgtcaacgtcactataggtacagacgggtgtgctagcaacaacaacctcgatatgttggaggagatcaaagtagcagctctgttacataaagtgaataagatggatccgtcggccacggaaatgttggagatcctgaggatggcgacggtgagggcgggtacggtcttctcgagcgagaagataggagccatcgaggaaggttacgcggcagacctagtagttttagacggtagttctcccagactgaatcccaatcacaacccgatctcaaacattgtatactcagcctcaggatcggacgtgaagcatgtgttcgtggcaggagaactcgtagtgaagaacggaaaactcgttaaagcagacgagcaagaaatactggaaaactccaccgagtgcgcagaacaactcacctcctcatgagtctaactcccaggtaaatcgccgctcccgctagcactactactagaagcgccactaacacccacgctgcggacttcgacgacaacctcttaagtttcttctttagtccttcatttagctttctgatcttcttttttatctcttcagtcactgttcctttgccacctctcttctcctcttcactccccttgcttaccttcttcccttcctcgctcccgcctccaccggcatgcccaccggccgtactcccgtgctcttgttcgctatgtttatgttcgctatgttctccacccttagtgccccctccgccgtgtcctccccccacgccggcggagccggccggcgaggggtgtgaggcgggcggagggggcgcttgggtttcccctccggaatgtgaagatccacctccggttcctccgccggaagggatggacggcggcggtggtggcagtgtctgcgcctgagccgcgcttatcgctatcaggaccagcgccgcgagagccacagcagcgcgccgcaagctatcaaccccaccagaggattcaccgagactttgaacgttatcaccgcggcgagtatacccgctccggctatcgtcgcggcgagtgacaccggaagcttaacaccgaagacctcgatgtaatctccggactcatgctcctccgacgcgaacacgtcagatatccttaccggaatccgcttcgtgccgcttatatactcatcataaaggcgtgtcacttcctcgtactccggtatcagttccgagtccaccaaccgcgccgcttcatcccgctgaccccgctccagcagctccgcgacgcgcttgcactcttcggacatctctaccaggagatcacgaattttagcggcgatctccgcgagccgctggagctccgatcggtactccggatgggtctcggcggctttactcaggtactccacggtacgaccccaggtctcggcggccatcgcgtaccatcgggccaacttacggtatccctccggagtcggcggaactctacctccctcgagagcgtagaggtacagggcctctaggaaggctttgtccagttcggtccgatagttgtcgtaattcggagggagctcttgtccgatgtagtagtaaccgttctcgaaagtggcggccgggatcccgtgtttggcgacaggggcggtgacccacggtggagacgttccagtctgttgcgtgtcgaccctcgcaccgatcactccggctagtacctcgcagatctgaagcgcccgttggaaggactcagggttgtcgttcccgtggatcgggccggccgggattaggatgaactctgacactccccagctcggccggtgcgcgtgaacgtctaggaagagctcgggtttccttgtgataggcacaccgactttgctccccagctccttgggatgtagcacgtaaggcagcacgtggttgtaaaacgtaagctgtccgagatcacgtgatactcggtacttctcctcttcacttccggattgatagtactccgccggaatcttgatccacgagactacgagggtcccctcgaactcgccagagttatacacgaaccacttcacagcctcgaacatgcatttgtgggcttgatattccagtggatgaacacctaaggacacccacacaaagtggccattaccgttcttccaaacataatactcaaccggaacttcatacgttttgtcgcctaaggtaactcgatatgtctccactagctcaccatattgcatcgagtagactccggtaagtgccgtaaaagtcatcgcgagcgccatcaccacacgacgcaccctctcacccccctgagacgataaaggtgtacccggcggccaggccgcccgatcatcgacggcactacggccactcacgggcgtgacgggaaccgatgtgccgggagcgtgaccgcggggatcaccgccgggagactcccgtctccccccgtcgggggcccggcgtggacactcgatcaccctcattaccattttcgggggatgctcgacgttggtcgtagttaaggagggtgagtacgctattcgggacccctccctggctccgaaaggtcgagacatgattgagtgggctcgggaccacatgccggtattaggggccatccgtgagcggttcgaagaagaacggccgctcgaaggtataaccgtgggaatgaccctgcatctcgaggccaagacggccgttctggtcgaaacgctgatggccggtggcgccgaggtagccatcaccggatgcaatccactttcgacgaaagatgaagttgcggcggcactcgtggaggaaggagtgcacgtatacgcctggcgcggggagacggaggaagagtactaccagaacatcgaccgggtgctctcccacgagcccgacatcatagtcgacgacggtgccgactgtatcgcgcgcgtgcacaccgagttcccggacctagcggagcgcgtgatcggggccaccgaggagaccacgacgggcgttaacagactgcacgcgatgcacagggagggcgtcctgaagttcccggtcatcgccgtgaacgacgctaagacgaaatacctcatggacaaccgttacgggaccggacagagcgcgctggacggattgatgcgggccaccaacatcctcctagcgggcaagaccgtagtggtagtcgggtacgggtggtgcggtcgcggcattgcacgtcgagcgcggggcttgggcgccaacgtcatagtagtggaggtagacccgatcaaggccatggaggctatcttcgacggattccgagtgatgccgatggaccgcgccgccgaggaaggtgacatcttcatcaccgctaccgggaatcgggatgtgatccgtggcgaacacatcgaaaagatgaaggacggcgtcattttagccaacgcgggtcacttcgacgtggagatcgacaaggagtatctcgaggaacattgcgaggaaaagatcgaccgcaggggtggcctggtcaccgaataccggatgccagacggtaagagggtctacctgatcgcagaggggagactagtgaacctggcggccggcgagggacaccctattgagatcatggacatcagcttcgcactccaagcgctttccgtcgaggtgttggcgaaagaagggaaggagatggaacccggagtgtacaaggtaccgaaagacgttgacaagcgcgtcgctgaactgaagctagaatccatggggatcgagttggaggaactgacaccggaacagcgcgagtacatgaagagctgggaagaaggtacatagcgtcgaggatcgggctccgaaaagttattttgccagcaattaacaggacctctcggcgcgcgccttttcaaccgaataacgggagggaacgtgatgaaactagacgatgtcgtcaaggagcacggcgttctctgtgcgtttgttgccaccgaggatgggttcgtggtcgacgcggcatccgacaccgacatagatcccgaggagagtgcggctctggcggctgaccgccgttatgagactccgaaacgtgatgagcagactggttttggcgctgaaagaggtcgaaggtgggatcatcgtcggactgttgtacgatagcaactagatccctactggagccgtcaagttaattcttcaggagcttgaggaggagtacagggggagaagcgtcgaggagttgctttgagggccaccaccgggggcgtaagtggtggctatcgagatcgaagacgtgaacgaggtcctactagctgcatcgctgtcagcgcttaaagagctcggtgaaactcctcatacgatcgcactagtcgtgaggagtctgctcgaagacggagtggaggagatccctaaggggttcctggacgagcttagggaggcattgcactcccctcctggatccgtacagtcgcggaaaggtacgaggtacgaaataggtaatgaggacgggaatatcaccattcgaatcgaaagctgtagctggaaatctatttgtgaacttcaggaagaaatgggacaaaaaatctgtcctgtagcaatcattatcgatgctatatctgaaacattacctatttatatcgaatttaacagcagttcagactgcgtagttgaagctaagagggtgaggacatgagtattgccagtatcgagcatacaatcgcgataatgtctactcttaataaagtaattaaagagaatgacggttcagtaacacatttccacctaagtattgtttcgagtaaaataatggaaacacaaacggccaaaagacgggtggaacaagtactcgaaaactgcaaaaaggtgtcgacactgctgttaaaaatggcgaatcaaaggtcgatattgatggatacatgtcgatagaatttcgattagaattcgatgatgttatattatgtacaataaatgagtgcccttataggagatggtgtactaaaatattatcgatggtaatagagggagaggaactaatggtactgccatgtacaatcctcatggagtgctgcctccaggactctcatgggggagtgcataaggtcgaaccagatgagaactcctgcgaaatcgagatcgtgctcagacactgaggtgttcctacccgagatcgacgatcgatgtcacgagctggcggagcgctacggcgttcggccttacatggtggcccgatatctgaccttcttaggacggtccgaaaccgagagacttctgaaacatatggaggacatccgtccggccattcggacgaatactatcttgatagatcctgaagaacttcgacgtgtcttggaagagaagcgaggattcgagctgaagcgctgccccgagcccgtggatgtggggttttggatcctcaacgacccgcctatctccatcggcgccaccttggagtacatgatggggtactacgtgccccaggacgccgcttccatgttacctccggtcgtactggacccgaaacctggagatcgagtgctcgacgcgtgtgcggccccgggtgggaagaccacccacctggcccaactcatggacaacgaaggcacgttgatagccatcgacgtggacccggaccgcatgcgggcgttgaagagcaacctagccagatgcggtgtcgccaacgcggtggccctccgtatgaacgccctcgacttgccgagcaccgactgggagttcgatcgaatccttctcgacgcgccgtgcaccggggagggaactatccacaaagacccttctaggaagactagccgcgatccggaggacatcgccacgtgtgccaggttacagcgccgcttgatagacgcggtcgtagatgtgttgagaccaggcggtgtgctggtctactccacctgcacattctcgcccgaagagaacgagctgatagtgcaatacgccgtagatgaacacggactggagccggagcccgtggacgtggggtgggcggacaggggactacgcgtgccgggggtcgagccgaaggtgcgacggacgtgcgcccggctgtatccccacagacacggtatggggatctttttcgtcgctagattacggaagcccctcagctaaggccccatcgatcacccattaatagctcaccaagggattccttcgtcatcggggcgcgcattgggagcattggaggagttcgagtggaagctcgccgaacacgatgttcctattcccgtccgtcaggacgctgtggcgctgtaccgtgtgttactggagacggttcgaatttgggggatagagagggaggaaggcgttcgggagagtagaagcgaagtccgcgcacggatcagctgtgagggactcgattgcgccgtcctcacgaaggtgggtgaagatcggccacaacttctcctgagaactgtcttgggtccgaggttgctcgcggaagtgttcgagcgggcacacgagagcggcgtcagatccttccacttcgaccttcaggggcgaggattgcgggtagagggcgagtacgacgtgggcatcgttcagatcaaggtcgtcggcgggggagcggggtgggagctgctggaggatttagagaagagggggttctctgtaactgggttatagtcggtcggcaaagggagagttcctcacacgttcggatagcggggacctcctcatcccgatgcgacgagctcctcacagaggtcgatgaaccgttcccgagcgttgcccccgaagagttccttacctctctcccccatacgcttcaggtcttcgggatcgatgctcagggctcgactcacggcttttacgacctcttcggggttagaagcgtcttcggctgccaccgcaacaccgcgtttctccaacttcttagcggtaacgtattgatggtccctgagcacgtccctcctgggcagaaccaccaccggcttccccagcgcggcggcctccacgggagtggctccccctaggcacacgacgagatcggctgccttcaacagggccggaaaatcgtggaagaagcgcttcaccacgatcccagaacacagtccattcagcgctcgtttcaagcgcttgggatccatggcgttccccgtgttcacgaccacttcccaatccctaagtagcccctcttcggcgcacctgacgagcccctccagagcgggcttgtagccggccgagcccgtagtccacacgagtactcgatctcccaggtcgtacttctcccgggcctcctccggatcggcctcctcgaagctccgaggcaacacgataccgacgttgatcacccgatcgccgtagtactcggccatatcctcatcccagactccgatgatgtctgcgcacaacttcgcgaccttacccgagacggagactacgtcggtcggctcgtaatgtgccacgggtaatcgcttgaacttcccggcgatcatcggcccgatagccacaccggcccccgtggacaggattagatcgggccgcacgtcacggagtactttggaagccgctaggtagttcttcagcccgcccagagcggccttccaggaggtatcacccatcctcctgggtctcggcagacctacgtactcttcgaagcccgccttcttgagccgttctacggcctgatcggagtcttcattgacggcgaacgtcacgtcatgtcctcgatcggataactcctcggcgagggcgagtgccctcgtgagatgtccgccatcccctgaagctattaacacgtgcacggacgttcccccggggactaccggttgggagtgcaggtaggcatagtcggcaagccgaacgtgggtaagagcacgttcttcgcggctgccacactgtcacccgtggaaactgcggactaccctttcactacagtcgatccgaaccaaggtgtcgcccacgtccgaacggaatgcccctgtaaagcgttcggtgtggagtgccagcctcggaactcctcgtgcatcgacggcaacaggttcgtgccagtggagctgatcgacgtcgcgggactagttcctggcgcccacgaagggagagggctcggcaacaagtttctggacgacctcaggcaagcatccgtgctgatacatgtcgtggatgtttcgggatccacggacgaggaaggtcgtccgtgcgatccgggtactagagaacctgccgaggacgtgaggttcctggagcgcgagctggacgagtggatagcgggcatactgcgcagggactgggaccggactgccaagcgcgcaagcctggagaaaatcccggcggcggaagttctcagggaacggctggcgggcatcggggtgtcggcatcggacgtcgagagtgccatggaaagggcggaggtaccgagcgacctcacgaaatggtcggacgaggacatccgacggttcgcccgggaagtgcggcgtgtcaacaagccgatggtcatcgccgccaataagatcgacgtcgagtgcgccgaagagaacctgaagagattggaagaggaagtcgagtacccggtggttcccacgtgtgccgaggcggagctcgcgctcaggcgtgcggccgaccaggggttgatccgctacctaccgggggattcagatttcgagatactgcaggaagaaaagctgagcgacgagcagctccaggcgctcgaattcatcagggagaaggttttgaaacgctggggttccaccggagtgcaggaggccctgaatcgggcggtattcgatgtggctaagatgatcgtagtgtacccggtagagaacgagaacaagttgtcggactccgaaggcagggtactgccggatgcactgctcctcccggaaggtactatggtacgcgaattggcctataacatccacaccgaaatcggggagagttttaatagagccatcttagtgaaacccgacgggagccgtgaggtagttggtgaagatcacgagttggaacatggagatgttgtcaagattcagacgtcctgaccccgcccctaagggggtgaacatgctttgagaatcctcgcgctaatattgctgctatcgctccccctcacccccgcactcgcggaacccacaccctccgcggggtactctagcccttcagagcaacccgctcaggaggaagtgaagaccgaggagcaaatggtcgaaaccagcaacgtacctcccagcgaagctgtacgcccatcaacccctgaacgggaaaaggaagtcacaaccacgacctcagcggctggtagttccgagacccccgagataacaaagtcggagaagacgaatgagaagaaggagaaccgcgtggtcaacctccgcgaaccgaaccccgtggagaaaaagaataatgcgaacgttacgatgcttatgggcatcctggccgcgtcggcgttaggcgcgtatagtatcgcgaagagaaagaggagagaagcgctcgtcaaggttcccgcagcatgatcctgtcggcctccttaatggcagcttccgccgcgcgctcaactgcctctttaatctcctcgtcggaaagttcgctcagcgggtgtacctccaccttaacgtctacgtccacggacttgccgtccaccgtcaccgttacgtcaacgtcctccaagtcacgcttcggaatcctgcgatagagctcccggagagctgcttcgtggatgcgttcgatgtcttcgagcttcaggccgctccggccccgccacctccctcggcctgctgaagagccttctggagcctcttctggaggttctcgatctgctgctggaggcgtttttcttgcttctctagtgtttttacccttagctccagtgtttcttttctgtcctcgagctcttccttcacctcatcacggtcagcttctatcagcaagccaccaacagttttgtataccttggtatcttcctcgatttcgtcgagttccttcagggccctttcgatctccctaagctgcagctccagctgctgcttttgcgcgacgatggagctcaactgctgctgaagctgctggagctgagccacctgctgctccacattctgcgccatctacacgtcccccagaaccgtcgtgatgacccgctctgagagcgcgaggagacggaacactccggaggctgatgctcggagtgccgacacgtcttccgcccggatctctatttgtatgttgttaccgcggcggtcgatatccacccgggatcgccgtgccggcatgagtttaacgtccggtaacaccgattcgtagaccactctggcgactcgttccgatttgagctcggcctcacatcgaagcgcgtgcacggtcccaccctcgtgttataacttcatcctctcgtccttggtgcggaaatcccggtagaacagggacggtccgaccttctcggtgcgacggtagaaggtaagggtccctaagtgacgaggatggccttcgaccaccaacagcacgtcggctagggcctcctcaagtacatcctccaaggagcccgctcggggaacgaattctactccgaggacttcggacagcgactccgcgaccttcatgtgaccggaaactgggcgtttcgacgtcgtgatcaccagatcacctgaaagatcaaccctattcccgaagagctcacgctgtagcttgacaccacctagccagaatgataatcgtaacctgggtgggatctctccgagatctattacatggagtcgggcggggttgcctttggcttccgtcacgtagaacaggacttcagcaccagattctagtgcttccagtacggtgtcccggaggttcttcgtacccctcagaacgtaagtagcatcgggtagtgcgcactccaggtcacgacatagcgagcgcgtgcgacgagcgggacgctgtgaggtggtgatggccgccggtctcaacgagctttatacctcctgggcacggggtgccggggcttcatcaccagtctgaaaccacagtgggtgcagcgaatggggtcttcgttgatgtccaacctgactttcttaccacacctcatgcagatgtattcgtacttctcttcctcgtacatggtcacttctcctccaacgccttccgaatagcgcgcctgacgatcctctgagcttcagtctcgggatagtaggctcctcctgtgaactccgcaccgcacttagtgcatctccaaataccggtaccgactctcttcacggcccgcttgtgacacacgggacactcgtgtttttgtcgctggaccgattcgatctccgcgacacgacgtcggatccgcattccgtacctgggtccgaagcgtcccgctggaccgaccttcttcgtacgacccaccgtcctgcaccccccgcgcgcaggccctttgacccctataaggtttggggagtgggttacagttgagccttgacggtgcgtcggacttcttccgccttcttcgtggctaggtcgatagcgtcctccagtagatgctcgggaaaatccccaagctctcccttctgaaccgcgcagacttctccactttcggtgacggttactgtcagcctggtgtccatgatgacctcctcctcaagacaggggtcgacgagcaggtactcaccgactttagcgatagtaacggagatgggaaagtcgttgatagcgagcggttcggtatcttcctccataacttcaacctcatcgtccacgacttcggcttttggcacctcggtgatggagagtgcggaaaccgagccgatcatggaggcgtcgaacaagttcccgtcgtggtccagtacgtggatgtctacgaaggtgacccagcagtgctcaccttcctctatgcagagctcctcaagatctatcatctcggactcgcggatccccctgtctacgacacgagagagctcgatcgcgttttcatccggaggaccaggttcgaaggatgggtcggcgagcggaacgagttccgcgttgaccgccagggctccttcgttaggtgaatcggggtaagggcgacccacctccagcttcacaccgacgaccagctgggtgttcccgagacggaccaaggccgacccgttcgctttggagatgaccccggcacgtacctcgatgggacgaaactcttcgaaatcacgcccgtcgatcctctctccggccctgatagcggcgagtacctcatgacgtttaatacgggctagcaggtccaggtccacgtcagtctcccccgtatttctcctttaacgccctgcgctgctctttgtacactatcttgcaccctttcttggccagcttcaccgcctgtttgaactccccaggcgtcatatcaccgtccatttggagcagcgtgatcttaccctctttcggcatcatggcgagcgggacgtcagcttccccgtaaccgtcttcgtagtacatgggatccagcaccactttcccttcgaccttccccgccgcacacgccgccaccagatcgcgcatctcgatccccgcgtccgctagggcaactgaggccgcactgataccggcacaccgtgtccccgcgtctgcttgaaggacctcgacgaagatgtcgatggccgttcgcgggtagtattcggtgaagatggccggctccagggcctctttagacagcttggagatctcgatagatcgtctgtccggacccggccgcttcctttcgtccacagaaaacggggccatgttgtaccggaacctgacgacggcacggtccggtttctgcttatgcctgggatggagctcgcggggcccgtataccgcggctactatcttgttggcccctaactccaggtaagccgagccatcagcccgcttcagtactccggcttgaatcttcagcggacgcatctcatcgggcttgcgaccgtccagcctcagaccgtcctccgagatcaaccgctctggcctctcctccattttgccgatcaccaccgtgagagtcgttttagattcgctttcaaccagtcggtaagaccacggagatgcgatcgacgctcgatctcgcggatagctcgtacggcgaggagctctcgttctttcttcggttcctcccgagcacgcacgtatatccgtccattggcgcccacgacgatgtcacagccgagaacgcgcttgagcatcttgatcatggaacctttacgtccgatcaccctggggaccttcacggggtctatctctacgacctgaccaccctgaagtcggccgagcctcgtcggagcatcgtcttcgagcagagacagttccacgcgttgtaccggatccacctctcgaacgaccgccgttataacatctcccggccggtagtacctggaaaggtcggtttcaatgagatcgacttcttcctcaagagcgttcgacacgtgaagtatcgccggaagaggcgcacgaacgtcgatgagccagcttgagaacttcacctcctccacgatcccaacgacgaaatcgcccggagagggcctgtaggggccggccagcggtatcactctgatcctacggccgtcgatgtcgacgagtccggtgactttagagtatacctcgtccccactggtgtacgtcccctcgctcgcgatcacctgccctctagccaacaactcaccgggagtgacgacctgacggtcctcgacgtacagctcgaactcgggcacgcttacatcacctcggcacgtaatccgggaacctttgcacgacctcgactacgagctcgagggcgtgtttcgcatcctcgagatccagcacctccgccggcgagtgtaggtacctggtcggtatccccactacacctgtcggaacgccacctctggttaggtgaatggccgtcgcgtcggtggtgcctccctcacctacctcgagctgatacgggatgtccagctcctccgcggtgtctatcagtagctttctcaccttggggtgagtgatcagaccccgaccactcgcgtcgactaccgtgatcgccggccccttcccgagcttcagctccgcctccttcactcccggcacgtcaccggctacggcagtgtctagaactacagcaccgtccgggtagacctcgaaggcggacgttttggcccccttcagacccacctcctcctggactgttcccaccaggtaaaacgtggggtggtctccgtcgaggtcggcgagacgctcggccagcgcgagaagaacggcgacaccgatcttgtcgtcgagacctcggccgttgaccctcgatcctaccagttctacgaactctccggctaggaccccgacatcccctacgctcacgagttcctcagcctcctccctgtctgaggcgccgatatctatgaacaagtccttgtgcttgggcactttccgccgatccttcggctcctggatgtgcggaggcttggtcccgacgacccccggcaccttttcgccttcggagttcacgatgatcacgcgtgagcccggtaagatcctgtcatcgataccgccgagcttcgcgaaccgtatgaacccgttcttgtcgatggacttgacgatgaaacccacctcgtccatgtgggcggctaccatcacctcgtactcggagccttcgatagtaccgatcacgttccctaaggtatctacgtggacatcatcacagtacttctccagtgtggcctccacgtactcgcggacctcgtcctcccagcccggtggagccacacggccgaccagctcgcgtaggtgttccgtgagggtttcgacggttcccattcagggaccctccacactctccctctccagtattttgctctcgaaatctcctttcgtgatctcgttaagcttctcgaagaactcgtcctgcagtcccgccggtaagcggactacggccacccaggcgccgtcgtactgccactcctcccgctcgatatcgccgaattcgcgcacgacgcccatagcctgtccggtgtacttcgcggggatacggatggccactttcacttcctcaaacttcatcggtaggaccggacgcaactgcttgatgacgtcctttacctgctcctcggcacttttcatagggtcgatgtgaacaccggcctcctccatggcccgctcgatccgctcaggaggatgcggggcccccgttctgggatccaccgcacggcgggcgattatgtggatgattttccgtttgacctcttcctgcatccttcttcgttgttccgcggttagctgtatttccccctccttgatcacgatttccgcgaccttaatgggatcggaagtgccgaaaagttcctccatcgcttgctctgaggctctctcacccttcctagcgtcacgaaagacttgttccacggccagtatctcctcaacgtccacgtcttcaccttcccggaatttacgggccccttcggggtctacgagtacctcgaagcgctcgcctcccttctccagacgcgctaccacggcgtcttctagactgactcgggccatcgtcattcaccctcgtcttcctccgaaccgactacacgttcaaacatctcctcgatcttcttccgctccaacttccggaacccttgtttatcgacgacggcgatctcgaggttgtcagcggtagtctcttcccgtgaggcttcgtacagcgcccgcaccgcgagctcgatggcctcttgaagggtcatgtcctcccggtattcctcttcgaacacgtccaacgcttcctgtcgaccctcaccgatcgccgtggctttgtgttcggtcagagcaccgctgggatcggtctcgaacaggcgacatcccttcgtgtccaccccggcgatcaaaagcgcggttccgaagggtcgaactcctccatgctgcgtgtacacctgcttgaggtcgcagatagccttcacgagcacgtccacatcgatcggctcaccgtaagtgtaccgatacgtctgtgcctcgatcctggcgcgctcgactaacacacgagcgtccgcgacgagccccgccgtagccgctccaatgtgagtgtcgatctggtagactttctctatggactcgggctcgatcagcttggaggtgacgcgcttatcgaccccgaggacgacaccctcttccactttaatccccagagccgtagtgccacgcttgacggcctcgcgcgcgtactcgacctggaacagtcgaccgtccgggctgaagacggtgatggcccggtcatacgccgtctgagcgggttgcacggccactacccccgattctcctcaggcagtggacattcgaagctagcgaacgccactatacgaccatcctccacgacgtcgacttcaccgttctcgtacaacacgaactcgcggttccccacccgctcacggtcccatttcgggattcgagagaggtaccgttccgcccctttaatcgttccggaggtaccgagaacctcgatgaaaacacgcccgagcttcggatcccgacggtataaggataatgccgcacgtgcctcctcctcttgaccccgtcgcaccctcaagatacccgcgttgagatcacggtaactacgtacgagccatggtccgatccggccggttcccgtgggccccagcaccgaaagtagagcccgaacgacgaggtccttcatccccccgaagtccagcgcttcgacgcgctccgaccataccttgaacgttacataacgccatctggggcggagtgcggaggacagacgcacacgcatgtgtttcaccccagtgagacgacgcctggcactgtgaaaacgtgcttacacgccgcgttccaccggaggatttccctgggagcctcgacacacatctccttcacctcgctatcttcaaaccccataagtttcaggagatcctccacctgcttcggtctgatcaattccagtggatcacgtgcgcccagcgccacggtcgtcggaaaccgtttcctacggcgcaagcgtaagagatcgcgaattcgagagacctgccacgcgagtcgctcgccctcccgtcggaacagtctcgataggtcgatctccacgtaagtccacttctcccgtgccagctcgatctcgtacttacccaaaccagcgtggggattaccgcgctctggatgtgatagcagatccaccctagtatcggagacagcagctcgattgattttagggtcgccgccgccgacggcgagtaagtacacgaggggtcgtgttcggcggatcgctctacggagagcccccgcagactccgcctccaatttgcagccgggtaggacgagcacgctctcaacgtgttcacggatatcccggatctcctcgatgagccacctcagatcgtcaatattcagacgctctgcttccagctccagacagaggacggcgatctcgtagtccaaacgctcggcggccagagccatcctcagggggtctacctcgtcgacgtgaactcgaagggcgaagttctcggaaaccctcaatcgttggagaagataccgagccgctctagcgtctttatgcccccctcgcggctcgcagggtagctctccaggttgactttcaccctgatcacatcgtctgcgtccgatatccgcagctcccccttgtaggcgctctgcttgtcgaagcgcaggtagaggttgcccttgtcgtctactcgccgctcgatgtcactccacacgcgcctccgctcctcctccggtatgttctcacgccagtgttccagaactcgctcgatgtacttcggtctgtcgatcttgacttgaaagatggtgatcgggttcccgtggtgtccctccgcgtagaacgtctcgggctcgacgtctccctcctcgaggacaccacctaatacgttcgccaacgcctcgagaactttcttctcgtcctcagtagcgtgggcgatcacgcgggccgagatactgttgacggggagagtcaaggtacgaccccgatgagggcgcggcgaaggggatcacttaccgcgcctcctgtgggcccgaaggctcggtctgactttctcggcacccttaccgcgcttccgcagtcctcgagccttcttgcccgccccggtcttaccacggaacacgcgtcctttctgggacttctgacagatccagttaatgcggtggtcgctcttgatctgcgggtgatacgggtctaccattatcacctcatagtacttgtactgaccgtcctcaccgacccagtaggaattgagcacctccaggttcgggtacttacgctgggcgcgctcctcggctatccactgcttgctcttgcccggtgagaacttgttcttacccatacgcttgggacgacgacccttcttcggtctcgacttgcgacgacctcccttgggtacgcgtacgcggacgaccacgtagccgggcttggctcggtacccgagtcgacgtgctcgctcgattctcgtcggacgcttaatacgctggaccgacggtcccttacgccacttcgggagacgctccttcaacagctctccgacgtaagagtccttgggtcgcttccacgcctcccgctggtacttgtacatcgacacggcatccaccccttcgcggccggcccacaccgacttaagagtttaccgtgaaggatcatccacgggttgacgcctatggggacgagccttcctcgatctcctcgagggtctcggccaccagctgtctgacggcgtctcgcccctctcgaaccctggtgaggaagatctcggagggcccgacgcgtcttaggacctcttcgactagctcgtcggtaggctccacgtcgagctccctaagccgagccctgaccacgttacgggctgccttgatcacttcggtggcgaactcggcgtcggaccgatctgcaaggtgcacgatgagggcttccggtgtgttcggaggtaccggagatccgcgaccgtgatgtgcggccaccgcgtggatgagttccaccggcgcacctcgagcgtacagctccgccgcgatcagtgtgaggtggtccaatcgacgtccgaagtcggagatcttgtaccgctcctcgcgccgctcgtaggacgtcgccttacccaagtcgtggagtatcgcggccgcgatcacgaggtcacggtccacctccaacccgtagatttcctcgaatacctcggccatcgcgagggcgagtttggttgttgccactgtgtgttcgagcaatccccctgggtaagaatgatgttgtctgcggctagccggagcctcctcgacgggctcgggatcgggtacttcttcgtgggcgaacccctcttccaaaaccttcataacgagttctcgcaggccctcgtcttcgatactttcgacgagctccttcagcttcagtttcaactcctcggtcctcaagctcgtctcccctcgggggctcgaaaatggtcgaggggacttcctttctgctgggagcgtaggttgcccgatcgggtacggatcttcgacacgacgctaagagacggtgagcagacaccgggcgtcagcctcacggtggaggaaaaggtcgagatcgcgaggaagttggacgagttcggcgtggataccatcgaagcgggcttccccgtagccagtgagggtgagttcgaggcagtgagggcgatagcaggcgaggaactggacgcggagatatgcgggttggccaggtgcgtgaagggggacatagacgcggcgatcgacgccgacgtggactgcgtgcacgtgttcatagccacgtcggacatccacctcagatacaagttggagatgtcccgggaagaggcattggagcgtgccatagagggcgtggagtatgccagtgaccacggagtcaccgtggagttctccgcggaggacgccacacggacggaccgggactacctactcgaggtctataaagctaccgtggaagccggcgcggatcgtgtcaacgtcccggatactgtgggagttatgacccctcccgagatgtatcgactgacggcggaagttgtcgacgccgtagacgtgccggtcagcgtgcactgccacaacgacttcggcatggccgtggccaactcattggccgccgtcgaagccggggctgaacaggttcatgtgaccgtgaacgggatcggcgagcgtgccggtaacgcctcgctggaacaggtcgtaatggccctcaaagcgctgtacgatatcgagttggacgtgaggaccgagatgctcgtcgagctctcacggctcgtggagcgactgacgggcgtcgtagtaccgccgaacaccccgatagtcggcgagaacgccttcgcccacgagtcggggattcactcccacggcgtgatcaagaaggcggagacgtacgaacctatacggcccgaggacgtcggtcatagacggcgtatagtactaggtaagcacgccggtcggcacgcgatcaagaagaagctcgaggagatggggatcgaggtcacggaggaacaactcgacgagatcgttcggcgcgtcaaggagctcggggataagggcaagcgcgtcaccgaagacgatcttgaagccatagcccgagacgtcgtcggcgaggtacccgagtccgaagctgcggtcaagctggaagagatcgccgtgatgaccgggaacaaattcacgccgacggcgtcggtccgtgtgtacctggacggtgaagagcacgaagcggcatcgaccggtgtgggctccgttgacgcggcgatacgggcactgcgcgaagcgatcgaggagctcggtatggacgtggagctgaaggagtaccgcctagaggccatcaccgggggcaccgacgccctcgccgaggtcacggtgaggttggaggacgaggacgggaacgtcaccacggcccgcggtgccgccgaggatatcgtgatggccagcgtgaaggcgttcgttcggggcgtgaatcggctggcacgtcgacgtagggactaacgcgtcgggtcctccaaccctaactcttccgccacttctcgaacggcacgcaccgatccttccgggagctcgataccctcccgaagtgcgcgttctcggcgtcggaactccggctctcccggaaggagaacatcatctccggcggatttaacttgcgatatcaacctttcaagccgctcgtagtattcatgctcatcgaccaaggtcgacaggtcgagcgccacgaacacatcacccttgttgcacggaaccgtgggatcagtagtcccctgaacatccttcccggcggcagccccgacgacgggacccgccagcacctcgagtgccaagcacagggcgtaccccttgtgtcccccgaacggtagtagtgccccttcgagggcctcctcgggatccgtggtgggctctccgtcgggccctacggcccagtcctgaggtatctccctgttctctcgcaacgcctgaaggatcttccccctcgcgaccacgctcgtggccatatcgacgacgataggtggaccgtccctacgagggaacgcgatggataccggattggttcctagcacaggttgggagccaccgtaaggggcgaccgcgggttccgtcccgcaggtcgtgaatccgatgaacccccgttcggcgaccagcgtcgtgtagtacccggcgatcccgtagtgagacgcgttacgaacagccaccatacctaatccgtgcttccgggcgagttcgacggcctccagtgttgcccgatacccgacgacgtgtcccagcgaatgatcggcgtcgtagagtacgaccgaggacttcctggagatttcctctatcctcatctcgggacggattgcgcccctcttgatcccttcgatataaccaggcaacctcaggacgccgtgggagtggaatccgcgaaggtctccctccacgatgacttcggcggcggtccgagcgtctttacgcggcacgccgacggcgtggagagcttcactgacgaagtccgtcaaatcctcaggccgtattttcaacgatcatccctcccgcagcgctcgaacgaaccgcaccttgatctcctccggatccaaatctattaagggaacgtcagcgtttccaggctcgacctctagccttaccatacgaggaccttccgtcgcgagcgcatcttctaaggctacttcagcggactcgggttcggaggcctcgaagtacgtcaacccatgggcctcagccaccttctcccaatcgatgcgatcggacggcgtaggctgatcgcctgtagtggcgtacgtggagttgtcgatgagcacgagggtatagttacgcggtctctcttgagcgatcgtagggagaacccccatgttcatcataagaccgccgtctccttcgatcgccagtacctcccgatcggtacagagcgccagtccgagaccgaccgagcaggactgacccatcgcccccaacatgtagaagttgaggcgccggtcgttaacacggtagagctcccgggccgggaaacccaggtggaccgtcactacggcatcgtaccgctcggccacgtcggcaactactctcagagcttcaattcgcttcatgcccatcgaccccgcgtcgcccggtcccgaatacactaaagccgttccccccggatcggccggagggcgcccggtgaaggcgttcgagaagtccgtgaagattcccaaggtggacggcgcgacggtcatgctggacaagggattgacacccgagttcgtggaatcgttcctgaaagtcgccggagagtacgtgacggccgtcaagctgggatggggcacggcccggctcatcgacaaggagatcgtcgcgcgaaaggtcgagatgtacgtggatgcggggctggacgtgttcccgggaggcaccctggccgagatagcgattgctcagggtaacttcgaggggtacttgaacgagctcgatgagctgggattcaacgcgatcgagatctcagacggtatgatcccaatgtccatcgagaagaagtgcgagctcatcgagcgggcgtgcgagcagggtttcaccgtctacgccgaggaaggtaagaagagagacgaggagtactccgtgctttcgccatccgacatcgtggggcgcatgaacaagtgcgtggaggccggtgccgagtacgtgatcgtcgaggccagagaaagcggtaagcacggtccgatgggagcggagaagagggagcgcgtgcgcgtactctcggagatcgttaagggagtcgggattcagcgcgtgatgttcgaggctccggagaaggagcagcagttcgagctgatcgtcaagttcggtcctgaggtcaacatcgcgaacgtcccgccggaggaggtgataccgctagccacactgcgggcgggtctcagagcggagaccatgggccgggtcgcgctggacggggaatgacgcttgaacgtcgatgacgccatcgtcgaggcgctagaggaggctggaatcaccttcgcctgctggctaccctgttccctcttggacgggatcatcaggcgattggaagaacacccagagatccgaacggtcagggtgtccagggaggaagaaggcgtagggatctgcgcgggagctgccctcgcgggcgagaaacccgcactgataatgcagaactcgggtctcggtaactccgtcaacgctctctgctcactcaccttaacctaccgactcccactgctgatgttgatgagtcaccgtggctacctgttcgaagacatcccggcacaggtggggatggggaaagcggcgcctaagatcttggaaaacctcaatctacacgcgttcacgatcgagcggccggaagagctggacgtgataccgggtgcctggaagctcgccgagactgcgggcgaacccgtcggtgtattcttaagtccgagactgtggcgtcagacgggccgatagaagacgtggaagcagtcccaactcttctctacgatcacgtcatgcagctcttcgaacgacggctcgtacagttccacatcgagtccgcgccaccggaccacttcgccgacgagcggccggtaccctccctctcggtcgtggagcgatgcatgtggatatccgaaagctgcggcgatctcgagaccgtagtccagaagcgtttcaatgaggtcgagagtagcatcgagccccagcagatgtatgtgatgttcgatgaacaacttcggtggatcatccgattccagtagctcaaccataccccgaattacctccaactcagctccttcaacatccattcgtacataagtgggcctctcgccgagtttttcagacaactcgtcgagtgttatcgactcaacctctatgtaatcaccatcctcggcgttaacgatacgatgccaattagatctattttccagaatcatgcgaatcctaccacacttatcagatactgcatactcgaaagctttaaccctatcttccaaattattaagagctatattctccctaagtaattccaagttttccctcacgggttcgatagcatacactcgagatcgctcagaagctaacgctgtaagaatagcgtaatagccaatatttgctccaacatcaaaagctatttcttcatcattaagaaatttaccaacaagatatttggacgctttcggttcacgaatattgcgaagccgaagttctcgtgatacaccagcatcatttgtatgaacacgaagatgaaaagaaacatcttctacctgtacgcgcacgatgtcacaattagatttcaatttgtccattatagcgtccactgtttcagtgagtagcacacatcccgcgtacaatagtctagacccaagtcgacgcggtcgatcccccattccaggatagagaccgagagcagtctggaaacgctttcgcaagtgaaagttcccctagagaactagttctgaaaacacatagtaattcaagtcatagtcgttatctactatagctactaccagttcgaactccgtaccttcaactagttttaaccattccaaaatatcctgagccgtaaattcatccaattcctcctgcagtactttgacggctatcctttcgtcttcaccgcggaacgcccgaaattcagtcccgaatttgcggcctggtttgggcttccatccacgtcgtctgagatcagcgtatactgcgtagcgcacggggaatctcggatcctcctccacgaacctatccatcagctcctccggactaatccgtacgtttccactacggacttcaagcctaccgatctcacataagaatagcgcttcttcaggccacaattgcagaccgcgacgtgacggtttcccgtacatggaggagtacagtctgttcgcatctcggtcattccgaacgagcaccttcgatccgactaactcgcctttcgccgccattgtcttccacccgcacggtaacaccgtcaacttcgatttcgtctccaggggacaccagccaccaaggcttcctgacgagcttaccgttcacacgcacacgtcccgactccaccagccgtttggcctcacgccggctttcggcgagaccgacgtccctaaggaacgcgtccaacctgcgtcctaccgtcactcgagctcttcctcccgtaacctcggcttcttcacctcgtaaatcggcttcccgtcgatcgtctcgggtgccagccagtcgatcaccttctcgacgtcctcgggtcgctcggggaaaacttccaccactatggggcccagcggggattctcctccttcggcgaagctcacgctcccagcgaacgccgcctgcttgttcaggtggaacaggatcgatccttcagcggtgactccttcccgcagtaccctccgggccgcgtctagaatctcttgctccctgagcagctcgtagatgcgacccagactcaggcgtgcctgcggaccttcacacacgaactccagtctcctcaagtcacccatttcctcctcgcgttcctcgaacatctccagatcgaacagattccctacggcttttcggactttctcctcgtcttcagtcgggtacacgtaggtggtcaaaaccacccgggagatcatccggatcacccctcaggattgcccttattaccattcggcacttctcccggaactccggcagactaacgcgctcgttcacgatcatcacgtcggctcgggaaatcacatcaccgatcccgaaccccaactctcgttcgtcccgctcttcgaactcccgcttggtgtccggatcgtcctcacgaccccttatccgtagcctctcgaacctagtctgaggggacgcatggatagccacgactattaccgaccgctcgccgaacctatcccggaagtactcgagttcctccgggttcctgatcccgtcgattaccaccactcccgcccgtctcagttcgcgttcgacgtcttcctctactaaccgagccaccgcgtccattcctcgctcctcacggagtcgcttcgccatctctcctacgtccatcccccgacgctcggcttcgcgacggaccgcgtcacccatcaccacgacgggaataccctcctcgcgggcgaccttgacgaactcacctttaccagcccccggcattccgaccacgcagatgagcatccggtgctcaccccctgaacgttctccgaaacagaacgatccgtacagatattttaagactcggtcacacggcccaagaagcggcggagccgaggagaccttatccgctccagcagctcggccgcgagtctcatgagctctcgatgcaccgggtaaggatccccggacttgcagccgaaagccgcggtgtactcggcgggatcacgacggtcgggcccttctccgtacactacttcggcgatcaacgccagggcacggactagactcggtccgacgccgcgcactgtcaggaactccttgaaatctgtcggattaacctcgtacaggcgccgcagagcgtctcgatcgagacgccttggcacccatccgtcgggtacttcgacaccgccctctctgcccaggtattcgtcgagcggtcctgagatgctgttcctgaccgccctccactctcgcaacacgcggtccggaccgtccccaaccagatcgagtacagcctcccgacacttatcggctcgatccccttgaagcgacaggactttcctcgtctcatccgccaccaccggatgtccctccacgaactccgagacttcgctgtcgagccagtggtaacgtcgcgcggtcttccgatcgacgtccatcccctgctggatcaccacccaccgaccgttttcatcgaacacgataacgtggtggtagaggtcgtgaccatcttggaggcatacggaatccgaccgtgccgttagacggctggccgtcaccaactgtcggggatccaaattcatccgatctgcgagctcccgcacgcgcttcggggtctcaagggccagtcgtcccttcccacccgcgacggcgatcccgtgttcttcgggatccaacgcctcacggagtgccgccgtgacgactgtagtactaccggatgtgttccgctcgtaccctagcagacacgccagggattggaaccatctcggatccgcgagcttctccagagccccgtcggtaccgtgctcctccaccagaagtcgaaataacgccctggatagtttcaccatctcgggaaaatgacggggtggaggacacttcacaagacggagctccgccgcgcggggcaccgccgccggttcccccaaacgttatgaatttcgtaacggttcctggcttggtgccggggccgggatttgaacccgggacctcggggtatcccaggccggtcacccctcggggtcatcgggccctatgagccccgcgctctaccaggctaagctgccccggctacgcccgcggggaactcccctctcgaattaaaaaagttacgtggggtagccccctatggagctgctcctaacgctcgccccggacgttcgaccggaggagaccgagagaatggcgcggaagatacaggacaagctcaaactacccgcggagcccgatcccctgaaaccggttcgcaggcttaggatcgagggtgtagaagaccccgacggaatcgtcagtaagctgagagaagagttcccggaggtctctcgagtcgtgatcgtgaagcgccgaggtcggtctcacgatctcgataggatcgccgcgcaggctgccaagctcgcgagaggtgagatactgccgcaccataccttcgccgtcgacgcccggaggctcgacaaggatcttccctacacgtcccgcgatctggccatcaaggtcggcgaagcggtgcgacgggttacgggtgcgtccgtagacctcgacagtccggaccggtacgtggacgtccacgtgtctcgacacgggcacctaatcgggatcaccccagcaacactgagggagccacaccggagttggcttccatccggcgcctttaagcacgttcacgtatgctgtgagcgaccggagacggagtacgagatcgccgacttaatccggataaccgcggcactgggactgggaagcctgatactggtagaaccgaaccgggacgccgttcgaggggccgaggaaaaggtgggggcttcttcgcttatcgaccttcgaatcgaagaggatctgaaagaagccttagcagagttcgacgtcgtagtcggcttacatccgacagcgccgaacgctgagagtgaactcctacgagcggtggaaggagcgaaccagatctgcctcctaacgggatcggaaactaagggactcagtcgagaggcgaaggagctcgcggacgtgctcgtacacctcggaccgacgacggccgagcctatgcggaccgccaacgcggtagcgtacgctgtaggtgtgctggccgccaggacggttagcctagggtcagccaccgctcccactcttcatcggtgacacctcgtagacccggttgacacatcatccccgacccatgggaaaagtcgctttacggaccaccgagtcgccagtccagggagtgtccggtttggtcctagaaaggatcttcgaggaagctgaaggcgaaggacgtggtgcgttgatcgggtacttgacctgtggacacccaggactcgaagagaccgtctcactggctcgggcgcttcgtgatggaggtgtggatatcctggaactcggggttccgttctccgagcccatcgccgacggtccgacgatacagaaggcggtagacgaggcgttacgagcgggcactacaccgtgggactgcttagaggtcgcagaggaggtgtccgagttcgtccccgtcgtgctcctatgttactacaatacgctccacgccaacggatttgagcgatatctctcggcggcggcggaggccggtgtctccggaatcatagtggcggacatgccggtcgaggaatccgacgaggtccactccgtcgctcgagatctcgagatcgacgtgatctacctggtagccccttccacgaccgatgagcggctgaagaagataggggaaagagcctcagggttcgtgtacgtgatctccaggtacggcgtcaccggagcccgacgggatctttccgaagataccctggagctcgttcgttgggtgcgtgaccacgtcgacgtaccggtagccgtggggttcgggatctcggaacgttggcacgtggaggaggtaatagccgcgggcgctgacggggcgatcgttggatcggcgttcatcaaggagatacaccggtccgaggacatagcggaagcggaagagcgggttagagagctcgcgaaggagttggtggagggtgcccgggacgggtaccgtcgaagatcatcctctgagtgacttaccggcggcttctttgagcttcgcagccagccgtttagccgcccggctcagtgctctctctgcctcctcctcgagtacttcatccgcgatctccaaggctcgctcgataaccttctgtgcctcctccggatccgacaattcgggctttctgcgtctcagctcgtcctgcaacatccgctctagatgcacataagcgcggtcggatagcgaagggacgaaccgttcgtagaactccgaacttagggattctttcaccgagcttcgatcgacctcgagcctctccgcgaggtatacctcctgccagagcctgaggattctctcgcgcgccttctccgaggcgatgacgcgacgggtcacgctcactcctcccctaacttgaggtgcttctcgagctcctccagaactttgcgaacgccgcgttcggctacgtaccctaacctccagtcgacgtcctctagcgcccgctccacagtcttacacaccgcctctacgacccagcggtactcgtcgacgtcgatcccggcgtcacgtaatctcctgtagtaccggctgcggaagttgacggcgaaacgctccagctccctcttcacctcgttggaaagttcgacggggtccagttcttccctcacgcgattcgagaggtccgaaattacctcctcagtagtgtgttcagccgtcaactgtcaacccccgtgagtcgagggatgaacgtgaagataatggaaaacctccgacaatggacggggggtcgggaagtccgcctacggtcatcccttaggggtcccacaaggctgaactcatcatccctccttccgcgcaaagcttttacgacctcgcatttccgtcacacgcatgggtagtcgggcccgcagctcagtccggttagagcgcggggctcataaccccgtggtcccgggttcaaatcccggcgggcccaccctgaaaacgttatgtaatttataacctttccctcgggaagatccctcatgtaagaacgaacggaacggggtacaggacggcgaccgcggacatcaccttccagtccagcccgttacggcggctgtaaaggtacagcagtaccatcgccgcgagtggcacggtaacggtagccagttccctcgaaccgagacgccagctcgtgaacaggagtcccacggcgactggaaacgtcgcctggaataccattgcacccgtcacattacccagggctaggtcgtcgcggcctttcaggtaccagatcacgctgttcagcttctcagggagttccgtggcgatcggtgcgagaagacacgacacagtgaacgggtcggccccgagcctctccgccagtcgttccaccgcatccgcgaacccgtgcgccccggccaccaacagagcgaccgaaccgacgaggaacacggcggccaacagacccgccagtactgggtgtgccatttcgagctcgatggaaggctgctcaaccacgtccccggttctcaggagccgtcgcacgtaaaccagatacaacaggaacagcacggctgcaaccgcgaaatgggcgggtttgaaatccgtgagtgataccgcaagcactaaggagtaagccaccagaaaatgtcgagcatctaagctgaagtgggaggtctttatcacgggccgccgccgacggcccatcaagtacgccgcgagcaccgaaagacctcctatccccatagcgaccgtcgacaacatcaggggagcgcctaaaatggcacctaccgccactccttctcggtatcccgcgatgatcgctacgataggtactaaggtttcgggtagggctgtggccacggcggctatgaaactcccggtgaatcccgacggcaacttgaaccggtaactgatccactcgacggtgttcgtgaacagccaggcacccaggagcaaggccccgaagctggccgctatctgcgctatcagcgtcaagggggccagtccccgtgtccggaacgatcaaactgagccggtgtggtcttcgggctcccacgtgcgagcccgtccggagatcctacttcgaacgacttcgcagataccgcgattatcaagtgagggagctctatgagtcaggtgtacggataaaggtgttggcccgagtgttcgacctctccgaaggggagatcaaagaaatcctcctctcgccgccgcggtgcgcgcgctgcggcaaaccgctccgcacgaacgtgccactatgctccgagtgcgaacgggtgctggagggagatgataggagccgtactgatgggaggtaagggccgaaggctcggcggcgacaaaccttggctgacggtgaacggtcggccgatcgtagaatgggcgacggaaatgctgcgtaggatcggttgcgaggaggtctacgcggtttcaccccgtagggacggacgctgggacgggccatggttgcgggatagtaagggatcaggacctatggcgggcgtgagggcggtgttccgagagttcccgaacgaaatagtgtgcgtgacgtcatgcgacgtcgtgttcgaccccagaatatttcgagaagtcgccgaacccccttgtcacacccgcgggaccctgttcccgttcctggtacgcgcggaggacgcaccggaacaccgcaccgttagagagttcttgaagaatataggatccacggaattggaggtaccggcgacggacctggatgagctagaggacttaccgcgatatcgagcactgctttcccgaatcaccggatgaacttccctctccgcctgcgttggtactcttcgatgcaacgcagtatacgttctttttcccgctcccgctcgcgttcttcccaccgcttccgagttcttctcacggcccttcggagctcgtccgattccacgagggccagagtacctgccctcttcacggtcacgtcttcaccctcacggagtagtggcagatcgaggcgacgaaactcctccaaagcgtgttccggtatcgacgcatcctccggtacgatcacggcctcaggactcaggtcggagagctctctaacgttcgactcactcatgccgctgggatcttcgacgtaaagcacgaacaccggcggagtttctaacccagcgagcgcctcgtgcgacgctttctccacctcgactaccggtattcctttacccgaccgaaggatggcgttgagcctctcggcccgtctcaactcccgttctaggcgttcccgacgtgacttttcgcggatcagttcacgtcttaagcgctcgatctcacgctccttagcctcgagcttacgacctatcttttcctcaacgagctcctccatcctatcgcgcatccgatccaacttctccttgagctcttcgttctcgcgcttgagacgctcaacgagacgttctaagtgctcaatctcatgttcgtacttcttgacctttttctcgtacgcgcgcaattctttcttcaacgaggcgatacgctcacggtatcgatggatcttctcgcgctcttcccgccgttcacgctccacctggcgctcttcttccactatccggagggcgtccacaaccgggagtcccttgatcacgtagctggcggcccgaagtacgtcccggcgcttgatctcttccgaagctttgcgctcgaccttacgcagagccggcttcacgatcgcgtggtatgcctttaccgccgcagccagcgcgtcacgttggtgggtgtccctgggtctgatattctggtctcgccgggcgagatgtcccttcacaagttcacgtttctcgtccaccgagagccgacgatccggcacgtaaagccgtgctcccagggatcgggccagccgtcgaacggcctgagggacaggagtgacgtcggtggcgactaccgcaggtctacccagtgactcgatccgctcggtgagctcactgaaggacagctcacgggaactctcgaggtgtacgacctcaccgtccgcgttgagaactgccaaggccgtggtcgtcccgggatccacgccgatggtgagaagctcacggcggtgggaggtgtcccggaacgtgatccggtcgcgaagtacgggctcgacgtcgatcttgatctcccgcgcgtcgaccttgttcacgacgggtttcacgcgatcgtaccgctcgtacacggtgaactcggcactggcgtaccctccctcggcctttctgacccgaaggtcgtactccatcccctccgcttcgaggagccgttggagctctctcgtggctctcttcaccgcggcgtgcaggttcctggcgtaacgtgactgactgtaccctccctgaccgggccttcgcaaacgacctattcggaccctcgtctcgtcctccagcacgaacgcctccacaccaaccccgagttccgccaggcgcgcacacgtcagcgcttcctcttcggggttccggggatcgggcgtcgggaggccgtgttcacgcgccaaacgttggagtgaccgttgatcaccgggctttcccgtgacttgaactaacttgagctcgggatgcgacttcacgagttctaagaactcagaagccccgtccaggagttcgtagacgtcatccacggcgaccacgtccggtttcagcgagagaatgagatcgaagagctcacgcttggagagacgtttcttgaggacttcctcaccatcctccagtatcgcgacggcatattccgggggttcggaccggacgatgtcgatccctactacgatcacgtccgaaaccacccggccggaggcctcttaggtttatcagaccgtagagctcagtaacttgcgggggccgttcaggtgaatccggcaccttccgagctgcggttcggcgcctacgctattgactgcgtgatcacggccgtgatgtcattgttaatatgtctggctttagcacgtccggtgactccggtgagattcctcagcacttggtcactgatttcgtggatatactggacgatgttcgaaggcacctacggagaaagcccaggcaaacgggttttcggactcaaggtcgtcaacgaagaaggagaggccgtgagtcttccggaggcggccattcgaaacgtttcgaaggccctacccgtagtgtgctacgtggacggtgcgttgatcctgctgaccgaatcgcgacaacgggcgttcgacctcctggcggggacgttcgtcgtcacttcaggatgagttgcctggcgacggagttcgccatgtgatcgccgcagagctctcgaactacctctaagcaggcgtcgattgcgaacgctgggcccctactagtcaccacgttcccgtccctcaccacccctttaggcacgggctccgcgccgttcaccttgagctccgcctcaaatccggggtacgtggtcgccttccttccccgtagaaccccagcctccgcgaggactaatgctccggaagataagcccactaccataccaccgtcggattctacagaccggacaaggtccaagcagtgccgataaccgatcagcgtcgtgggcgcggatccgccgagcacgaccacaccctcgtaatcgtccccctcgacgtcccacaccgtggagtcgacgcccacttccatacctcccatcccttcagcacgctcctcgacccccaccaaatcccaatcgagcccgccgcgtgagagtacactcacgaccgcgccgagctcgagctcctcaaacccgtcgtccaccagcaccgcgatcaagggggaacctcccttgctcgtcgtctccctggggtgtccgaagatcccaccgaagatctcctccgcgatttacgcgtgctaccggtatgacgatagagcgttagtactcagcaccgaggcgggatgtaagctcctcgagtacgccgaccctgagaaggagtacgtggatgaaactcgaacgtacgagaaatacctagaggacccggatgccgccggtatcctgctcgcgttcgtgacgaacgatacggaattacagatagcggtcaccctgaaggaggtatcggaacccgacgacgcgagggcggtatgtaccgaggagttcgaggatcggctcgaggactgcgggttccttaccgcaccggtaactggtcggcggtggaagcacgacccgaagagatgggttaaggcggtcgaggacgtgctgggggcgagtcgatgacgttctgcctcgaggagcgggagtacgagatactaatggcgagaaggccgttcgacgactgtgcgagatacatcgaatcgaagtttggaaacatcgtcaagttacagcctggtgaggagattctgccgggacttcgagcgataggatacgggaaaatcccggtggcgtacggggatgaatggattgtactaccgataacgaaaccgtgccacgggagcttcgtcgtgaagatagaagttagtgcagaagaactcgagtggttcctgaagaagcatgtaagcgggcgttagcggcgtccaccacgacctgtcttccgggccgcgatgtgaccgaccttcctacccggcgggtcacctctggcgatcgtcgtgggcttacccgggctctggtggttacctccaccgaacgggtggtcgacggcgttcatcgcgacgccacgtaccttcggccacttaccacccttgctgcgcatgtggtagtacttcttacccgccttcacgaacggcttctcgcgcttaccaccaccggacatgacgccgatcgtggcccgacaccgtgggtcgaacgtacgtaccttaccagaggggagctgcacgtaggtacgtccgacatcgtgggcgatgatggtggcgtagcatccgggcgcccgcgcgaacttaccgccgtcacccggctgtccctcgatgttgaatattgggactccttccgggatctccgcgagtggaagcgtgttgccgggcttgatctccgcggacacaccgcactctatgatgtcgcccaccttggttccctcgggcactagtatgagtcgctcctctccgtcctcgaacctcactctagccacaggagcgttgcgtgccggatcgtggagcagctcgactaccttaccgacgaccttgcccttcttttcctgttcatcgtaaggcctgtgctctatacgaccacggtaacggtgagatggagcgcggtacgtaggcccgccacgtcccaaccgctgcgggcggatacgcttgcccatctcgggaaccccctacaggatccctagatcgaccgcgacgtcctcggcgcggtactccggctttaacttgacgtaagctttcttctccccggtcggggttattagggtatttaccttttccacctcgacgtcgaacagctcctcgacggcctttttaatgagcggtttgttagcgtcccgccgcacgatgaacgtgagcttgttctccgcctccatcaaccgcatcgccttctcagtggccactgggtacagtaggacgtcgtgtgggtcttcgatcttaggaccgtatctcttggccacggtttactcccccagacgctcttccagtacctccagggctccgggtgtgaacacagtcagtcgcccgggatgcgcaccgggagccaggtgttcgacgcccaggtgcatcgcctcgaccacgtcgacacctggatggtttctagcacctaacttgataccctcgtcctcgtccaccacgatgagcacgctcttcggctttacgtaccgtcgaccgcgccgcttacccttacctgcccggatgcgtcgattgctcttggcccgctctacgtcggcccacaacccgacgctcttgaagaattcccggacctcccgagccttgttcaggcttttcagctcgtccacgaccaccaccgggaggtgtggaacatcgtcgatcacatggccgcgctccttcacgaactcgggcttggctgtcgccgccagagcggatctgagcgctgcacgtcgctccttcctgttaacccgctgggtccagtccttctcgggtgtcggtgcgtgggccttctgtcctccgaccgcttgggcgaccctggcagccctaccggccgccgggtgcctccgtcccttgaccctcgggaccatcgccacgccgtgaccggcaccccaggactcggcgctcgtcctgaaacctgcgcgcgggtcggtaccgtagggttggcggcggttagcctgagctgccagcaccgcgcgccggatgaggtccttacggaccggctcctcgaagaaagacggtagctcgaccgtgtcgacctcttcaccctcgaggttgaaaacgggagcctccactatctactacccccttaggcactcgcgggacctccgagctgctccacgatctcatcctcggaggccttcggccggacaccctgctgcgacgtccgactgatgtacaggatctcaggcgctccctcgggcgcgttcttcggtggtcgtacggcgggtcttacccggatcaaccgcttcttcggtccgggaaccgtgccgtggatcatgatgtaatcaccgcggacgactccatagttaacgaaacctccgcgtggagtgacttcctcaccgtcctctccgatcttgaggatgcgcttattgtgctcggtgcgctggtggtaacccacctgacccgccatcgggacagtccaccttaccctagagggtgtgatcggacctatcgatccgatgtgtcgtcccttctgcttccgctgggtcttacggtcctggatcgtgacaccccagcgcttcaccacgccctggaagcccttacccttcgtgatcgcagagacgtccacgatctcgccctcgtcgaagacgtccttggccctgatctcctcgctgaggatctctacggcgtactcgaagcgctcccgtacgtccttgccgccgatcctgtactccataacgtcgggcttcttcttcgggactccagccttcttcggctgtgtggccacgatgaccctgatctcctccacaataccctcgtcgacgagctcctcgatcttgtccaggtctccagcctcgccgtccttgggtaccgtgaacacccggtccatctccagctcctcgggaatctcggcccatgcctcggtcacgcacctgtaaccgtccggcgtgggcgcgtaagcacggatagcggcgacgtacatcggaggagcgtcgaggatcgttacgggcaccgagatttcctcaccttcggtcggactgttgggccagtcgtcgatcatgatggcatgggtcattccggctttgtaacccgcgaatccttgcacgcgcactctctcctcgtccggccaacttcggatcctaggaacgggccgtgaggcacgcttcctcgggctgaaggccagagaaccgcgtcttggcctacctggattcctgcgtccaccgcgtcccatcggccgtttcccccaatcctccgccgttttctcggctccggcgggacgggtccgaccgtataaagtttgagcgcgcggcgaggtttttgagttcggacgcaagttgatctggggagaaaaggatcggtcggggctcggaggcagtggacgtcagatccgccgagcgcttgctggaagacctgaaggagttcgctgaacgcgtgaacaaggctttctccaggatcaacccgcagatcatggagcgtcggactcccagaggatggctacgtgagatggtacgggaatacttcgagaacctaggagccgaagtgctccgtgaggcgtgcgagattgccaaggaggatatcagaagttaccgagaactggatgaactactccaagagatcgagcgctccaccgatcgagaggaggacgttttgtacgtacgtcgggccctcctcaggtacatgttctgcaggacgtacacgctccagcgattgttagtccgactgtactggagcctgagcgccggaacggcggacgtcgccgagctcgtgggaatgcttcgtagaatggacctgttcgcggaggaagcccaactcatctaccccgtgacgccggatgtagaggacctacgtgaagcggtgaaggacgcgatccaggttatcggggaggaggtcggagccggaaccgaagaagaagacgaccgtttagaaccggaacccaagctcgaggtgtgcgttgttcgcgggaagctacccgcttttgtggatccggatacgggcgcggaggtgccgccctcaaaggagggagatttattaatggtcggggagacggccgcgcggatcctctcggaacgggggcgtcgatggggcggtcccttcgcggaacacgtccggaggtggagggggtgagtcgttggctaagatcccgaagaaaatccggacgtactgcccgtactgccggaaacacaccatccacgaggtagagcgcgccaagaagaaccccgcgagaaagatgtcgtggggacagcgtcagttcgagcgcgtcctgaaaggatacggtggattcccacgtcccaagccgtcgggcgagaaacccacgaagaaagtggacctgcgctaccggtgcaccgagtgtggtaaagctcacacccggaagggttggcgagccggcaccctcgagatcaccgaggagtagggggtgagatcgctttggatgagaagcgattcctgaagaggttcaccgagtccgatctcgtaccgcagcctcgtagcaggttcctccgcgtggagtgcgtggattgtggtaacgagcagatcatattcggaaacgcgagcaccgaggtaaagtgccacatctgcggccgcaccctagccaagccgaccggcggtaaggccaagatcctcactaagatcaaggaggtgctcgagtaatgccccggaagttacgcgatcttcccgaagaaggcgagatagtgatggccacggtagagcgtgtcgaggaccacggagccttcgtcacgctggacgagtacccgggagtggacgggtacatccatatctcggaggtagcgagcggttgggtcaagaacatcagggactacgtcaaggagggtcagaaggtagtcgccaaggttatccgcgtgaacccgaagcgcaagtacgccaacctatccctcaggaaggtcaccgaccaccagcgcaaggagaaactgaaggagtggaagcgtgagcagagggccgaaaagctcctagaaatggccgcagaagagctcggcaaggatctggacgaggcttacgaggaggctgggtacaaactgatcgaagaatacggatccctttacgatgcactggaaagggcggccgccgaggaagggccggaaccactcctcaaggccggagtaccggaagaatgggccgaaaagctcgcggagctggcgattgagaacatcgagccgggtcgcgtgaagatcgaggcgtacgtcgatctcacatgcccggctccgaacggtgtggagataatccgtgaggcactcgagaagatcgaagagttccagcaaggcgacgtgaaaatggaagtacagtacgtaggagctccccggtaccggatcaccgtggacgctccggactaccgaacggcagagaaaatggtcaggaaggcagctcaggccgcgatcgaccacgtggaagagcacggaggcgagggcgagttccaccgggagatcgaggaggggtaaagcgtgcctaaacgactacgcaggtgtaaggagtgcggggaatacacgcttcaaagggacaaatgtccgcattgcggtggagatctggaggtgccgcacccgcaccgattctccccggaagacccgtacggtaaatatcgaaggaagctgaagaaaagggtgtgggccgagaaattcggcccgccttccggcgagggggattaaaagttggacctgctgaagctggcccgcggaaacaccgtgatcaagttcgatttcgagccagaagtggaggagccggtcctcgtggaggggcttcccggcatcgggcacgtaggcaagctagccgccgaggcgatgatcgaggacttaggcgccgaaaagttcgcggagctgtactcaccgtacttcccaccacacgtatccgtgaatgaggatggcatcgtggaagtaatgaggaacgagttctacgtgtacgaatccgaaggtgatgaaccggacatcatcttcctcatcggcgaggcgcaggcgcagggtgagctcggacagcatgaggtcaccatccgcatactgcaaaccgttaaggagttcggaacggaaatgatcttcacactcggaggcctcggaaccgggaccgtcccgacggaacccaaggtcgttggggcggctacgcacaaggagcttatcgacctgctgaaggagcacggtattgaagtccgcagcggcgacaaaggcggcaacatcgtaggagcttccggtctgctgctcggcttcgggaagatgatgggcatgaaaggagtctgcctgatgggtgtaactccggggcacgttatcgacccacgggccgcgatggccgtcgtcgagaaactgtccacgattctgggggttgaagtcgaggccgattcgttgaagaagcgggccgagcgattcgagcgcgaattcgtggcacagctggaggagatgccttcggcgctcgaagaggcgcagcaggaggcggaggagggtaagccggaagaagacctcaggtacatcgggtgagcctcgttgggatcacattggcgacacgccgtccgcgctatttcctcggcactctcccccttcatccccccctcactgtccccttggatcgccttggtttccgtatgtgtggaagagtacggtccgcctctcacagccgtagcctcaggaatcacggcagcagctatcaccggacaccccatattcgcaatggtttctgccctaataggcgaatttaccgtgggagccgcgcttcgcaggaagctcccacgaaatcccgtttcaaccctgctgtactccgccgtgggaggagccgcagtagctccattggtactccgagctacgttaactccccttcacgccttgatcttcggactcacactctttacggctttcatccggcccccactcgcccccataatctacgagaagcgggaacggtacgacccgtggaattcgatcgtcctggccgcgctgatgatatacggtcttgcaccgctcgtaggtctcgagaactcttgcttggccttcctcgtcgctaagggcgtagatggagccggcggtctcgcacagttcatcccgggatcgatcaatcccgtagtgtcgctcaaggggtttcggatccgtgaggttgaggagggaatcagcccgatcggaacgttcttcgagttcttagcggcgttggggttaggatggctgatcaccggaagcactcaaggtgccttagtgatgggtatcgccgtaaccgcggcggacatcctctcgaacgttaccggagtcgaagaccaccacaaaggagacgacctgctcatgatgctatcggcggcgtgggtgatccaaaccttcggagtctcgggcttaatgcggctcctagggctgatgccggggtggtgaggggtggacctaaggtacctaaccagcgccatctcggtatcgctgttcgtttactcgggcatagacacagagccgctccagtacgtgacggcccagtgggtggaaagtgtgctccacttaatggggctcaccgttcccaaggccggctacacgttccaagtcggaaccgtaagtgcgatgatcgtgaagggatgcgtcgtctggcccgctatctcgctgttcgtaggattgatcgtcgccactcccggcccatccgtactccggaaaatcgccgccctcgccgcgtccgtagcactgctcacggccggcaacgtgctaaggctggcgagcatgttctacatgatggaggtgtggggagtagggttccgactagcccacgatgtgatcggtcagttggtgggactcgccatcgtcatactagcggcgtgggtggcgttctatatcgtgccggaaaccgaagataagctccgtgaaataatcccttggccgggtgagtgaagtgggagaacaatacgactcggacctacatctacactcccagtactcgggcggtacctcaccgagaatggtgatacgggagatagcacgaggagccgccaagaaaggcctagatctcgtcggcacgggcgacatactgcacccgaaatggaggcgccacgtgcggagggagctcgtggaagacgaatacggactccttaaggagccgaaaaccggtgtactgttcgtcccgacggtagaggttgaagacgagcgccgcgtgcaccatttaatcatcctaccatcactcgatcacgccgaagaactgcacggagaactttccaggtactccgacgacatcgatgccgaaggccggccgcatctgcgcatgactggggcggagctggcggatttactcaaagatcacgattgcctcttcggacccgcccacgccttcgtgccgtggacgagcgttttcaaagagtacgactcgctgagggaatgctatggtagcgccatggaccgtgtggacttcgtggaactcggactttcggcagattccgattacgcggaccggatatcggaacttcacgagtacacgtttctcacgtgctccgatgcccattccccatacccgcatcgtctgggccgcgagttcgtgaggttcgagctagaggagccgtcgtacgacgttctcaaagcggcgatcagaaggaaaccgggtggccgcgtggtactcaacgtgggactcatccccgagctgggtaagtacaaccgaaccgcctgtgctcggtgcaagcgccagttcgagctcgaggaggcagaacgccttaattggagatgccctgaatgcggaggtacgattaaaaaaggcgtccgggacagggtcttagaactggctgacctcgagaagccgaagcatccgaaccatagaccaccttacctcagaattatccctctagccgaaataatcgcgaaagccctcggactctcgactataaccgccaagaaggtcagggctgtttggaactcgttggtccgacgcttcggtagtgaaatagacgtactaatcgaaacaccgatcgaggagatagcagaagtcgatgagcgggttgctgaactgctgaaatcgttcagggagggaaccgtgaacattcgaccgggtggaggcggagagtacgggaaaataatcacggaagaggaatcggaacgcgaggagcccagaagtcgcaagcccgtccagcgcacactcgacgagctgataggccgggggtgacaagactgtttttcaggcgacgaagcgtggaatccttcgcggagagaatcgaagtcaaggtaggggtggaagaggagcttttcctcatcgaccgggacggatcactgactcgggctgcagacgatgtaatcgtgaaggcggcggagctgttggagtcagactcgaatctcctagaggattgctggcgaaccgttctggggttggatcccgaacccaatccggcccaaatcgaatacctgacccagcctttacctcccgatgaagtgatcgaggcctgtgagataggcagggaactcataaagaaagccgccgaggagttgggactacaggttatgttagaaagtatgcatcctttcgagagcgacccgctacctattaacggaacccacatcaacgtgatggtgaaacttaaggatcaaccgtacatgactccaaagcagatattagtagtttacaattggttgtggcataacttaccaattataatcgcagcaactgcgaacacaccatattgctgtggcggaaaaaatctcgcagctagttgtcgcctcctcaaaagcagggtactcaaaccgaattactacgcagcgataaagcgtctggagaagcgcccatacttgacgaaaacccagtattatggaaggttgaggtacagactgagacttaggaaggatactgagttcgaggagcgggtcgtagcgcaccccgacggtcgaaggctcgtggacataacccccagaggacccgcatcgaacgtcacgggagacgagaacgacagcccgactaggaacagagttgaggtgcgggtaatcgataatcaaaagtccatgaaatatttacatgatgtggtaatgcttatagtaggattatctttggaagcactatatatatatgaagtagagggtaaattaccgccaaatgatcctaatcattttgataatagaagagaagccatagagaaaggtattaacgctactttcgttattaacggtagggaaattgatgctgaagacgccttactaaaaattataagtagagtagataaatttttagagcatttgggattacgtttcgtatctcctcttaagaatggaaaagtagagttacaagagaggccaaaactaaatgtagagtatgtacataaggatgtcataaagtatatcggaaattacgcagaggttatattagggtcgaataaaactgttgaaattaaagggaaaaggtacacaattccgaaaggtactaaagtaatcggtaagttagttccgatggcatcttacaagtacagagttgataacaagggttttgttaaggatataattaagggcgttgtaacactcggaataaagcgaaacggtgtagaaattcccttagacgagagtgacagaatagtaaacgtaatgtcagagctggagtacttaatgcgttcgatgaggggattgttgtgaaatgatcatagacgtgcataaccatctaggagaggatatcgacagtacagttcaaacaccccagatgctgttggcaaggatggaagcggcgggcgtagacatcgcggtagtgtttccgttcaatgacgtcgatccgggagtgtgtttctcgaaagccaatgatcgaatcgcgaaggcgtgcgaagagtacgatgagttcgtgggattctgtcgggtagatccgaactacgaggaacgcgccgtagaagaagtggaaagatgcatagaggagctggggcttaaaggcgtaaaactccatccccggagccagtcgttttaccccgacgatcccgaggccgtgaaggtcgttgaaaaagccgcagacctgggagtacccgtgatactccacactgcacgcggtgaaccgttctccgatcccgtccgcgtcggtaagttagcggaggaagttcctgacgttcagctgatcatggcgcatatgggtaaggagctaggatatgatgcggcgattgaagtagcggaaaactacgagaatgtttacctcgaagtatcgttggtaaaagaccccaaagtaattgagaagacggccgaacgtgtgggtgatgatcggataattttcgggtctgattcaccttatggtagcccatcagtacaacttgaaatcgtaaaagaagcggatgttaatcacgataaaatcttggaggaaaatgctgcaaatatattggggttgcggtgaagattgcttcgtacaaaggttatagagttagttttacatgatggaccaataactgtcgatgaaatttcaaagaagttaaaaattgattcagagtcggtattaaagatagttcgaactactcctgatttgaaactagaagatgggaaggtcagcgcccagatgggtattaacggatatatagaactcaccgggacgcggccagtgctgataacagcacctcacgctcaaggtccaggtgcggatgtatttacgggtgagatcgcgtggaaggtggcccaagctaccggagcgtacgctttagtggccaccgtcagcaggcgagccaagctggaagacgggaacccggcggattacaaccgcgagtgggcccggaacactccatttcggcgtcgcatcgacgagctaatcaaaaggtacggcgttcggttcataatcgacgtgcacgggatggagtccgatccagtgcgaccggacgtagacttggggaccttaggtggccgatccgcgaaagggaagctcgtatccaagattgtgaagcggttggaagaggccggtttcgacgtaggattcgaacaggaattccaaggtggggacatactcgagtaccattgcgacggagagcgtgttcaaggcgttcaactggagctctccgaggagctaagggagttaggagaatatagagccatacaggctgtactcgtggtcgttaatacagtactggaggaggtgtaataccatggtagcggtggtgttggtcgggcacgggagccggcttccctacagtcggcaagtcgtcgaaaaaatcgctgaatacgtcgaagagatgggcgacttcgagaccgtcgaagtaggtttcatggagctatgtgagcctaccgttcaggaagccgtaaagaaggcggcagagtccggtgtcgacaagatagtcgtcgtaccggtgttcctggcccacggtgtgcatacgaagagagatatcccgaagatgctagggctggaaccggagtgggacgatgacgaagacgaccacgaccatcatcaccaccatcaccgcgactacacgcccgtagacgtagacgcggaaatagtgtacgcggagccgctcggggctgatcccagaatcgccgagatagtcatcgataggatcaaagaggcgctaggcgaggaataaccggggcctccgcttgatcatcgccactcttacaggcagaaccatcgaggatatggtggaactggctatagaagccgtagagcagggtgcggacgctctggaggtcaggctcgattacttggagaacttagacatgtcgacggcgctcagagccgtgcgagagtgtactaggtacgaacgcgtagtggcgacgctccgacgcgaagaggagggaggactgtacaaaggcgatgaagatcggaggctcgaaatcctggagcgggtgtcctccgaggccgactacgtggacttggagctcgacgtagcggaggaagagatcataagcccgtcctgtgagacgatcgtgtcgtaccacaacttcgaaaatacgccgcctaaggaggagctgatcggcatcagggaccggtgcgccgaattaggagacgttgcgaaggtcgtcactatggccaggggacacgaagacgcactgcggatcctggaagtagtacgaacggcagaagcacccactataggattcgcgatgggagaggaggccaagtacaccagggtagtgagtgttctgatcggcgggttcgcgacttacgccgctgtgaggaagaaagcggcaccagggcagctgacggtcgaggagacacgcaagttgctggaactactcggttagccgctcgaggatctcctccgccgctttcttccctgactcgagcatcccgccgaagatgggccccatcctgtacgcgcctttcaccgccgacgctgccatgccggcgacgaacagtccgggcttcacctcctgggtatgcttcactacgagttcttccccgcgctcagcccacatgggcccctcgcccttcacttcgatgcccgctagcttgcagactgcagcctcgtgtccggtcgcgtctacagtatactcggcttcgagagctagcgggtcgacgtgcatgttggcagctttcaccgccgtccagttcaccactaccccacacacccttccgcggcgctcgatgacgtcctcaacctctatacctactaggatcctagctccggcctcaagggccgcgttcgctagcttaatggcggcttcgacggggttgaacgctaggagacctgcctcagcgggacggagttcgactccgacttcttccagcacctcagcggtttcttccatgataacgcccgctgggaacagcattcctccgccggtcatgccgcctcccacgtacagtttccgctccactattgtaacgtcgacgtcgctcttcgcgagctcgtaggcgcaggtcagtccggccggccctgctcctactacgatgacgtcactctcggagcaatcgttaatgaattcataaccttccctaagaacaataggggtgatttccctctccacgcgtatggacccctgagagggtttactcggaggagagctcccgtaatcggctttccaaccgttcgattttgcgacggatgtcgttacggaactcgttaaacctctgttctagttcattcagcttacggtcgagagcgtcgacacgcttctcgaccttttcgacgtcttcggtcgtggccaagccccagctgtcgataagctcctccacgcgacactcgatcagctcgtcgacctttttggttatgacgtctgacctagtagtcaaggaaatcttgtcgcgaagcatcgagagaccctccccttcaggaacctcccgactgcgaactatgagcgcgatcgcaacgataatagctagcgtgagtacgccaactgctacgaactcggctatcgtcattcattctcaccgcctctaacatctccctccacgcgctctaggtccttcaagatcttctcgagacgctttaattcggtttcgagttcgaccacggtcaaccgagtctcaacgtccatatatttttccgccaagcgtgtgagcagcgagcggatttcacccactcgcttcatcagacgcgtgtcttccgggaggtaaaacaacagatccaagagctttcgacgctcgaggtccgccctgacgagctcgaccttctcacgttcgaccttcagttcgagttccctgatacgtagcttcttcgagtaagttttgagggctatgagaactattatcacggccgcggtcgagccgatgagtacggagacgaccataggttgcagcaggacctccgcgagcaacctttatccccgcagggcacgccggagctccttgataacgttttccgcagcgtccaagtctccggtgacgtcggtcgtcagaggtgtgattactatggagccccgctggagttcgtacaggtcggttccctcgggcggatcttggataatctcgccgtcgatccagtagtatcgacgcccacgcggatcgtatcgtttttctattctgggccggtacatcgtgaaagctaatggaaccactttaatttcgccgttccagcgatccggatccggcacgttgacgttcaagacaccttcccaattcgcccctcgaatcgcttcgagcagggccttcaagactctgatggccaaggtgaagtcgacgttcttggcgttgttgtccacgcgtgctctggcgtcacggacctcttgcgagatcgctatggccggaatgccgttcccgtaagcttccagcgctgcgccgacggtccccgaggtcgtgacgtcagcgctgacgttctctccgaggttgatccccgagaccaccaaatcgggtggctcatccatgatagagaacgctccgatgaggacggcgtccgccggcgtaccggagatcgcgagcgcgtcgacgccttctacctctatctcttccacccgcactggctcgagtaaagagatactgcgccctacaccactttgctgcgtcgcgggagctactacggtaacttcaccgacactcctgcaggcgcggacggccgctcggagaccgggagaggctatgccgtcgtcgttggtgatcagtattctcacgccaatcaccccgcagttcacccttgtacacgatctcagccctccctatcagcagcggtccgtcggaaagcgacacgcgcaggcagcctccggccgtccggacactcacttcctcgaacggtccgaagatctctgagtacaccagagaagccgcgacgactccggacccgcaagccggcgtccagccgacgccacgctcgaacgtcctgactctcagctcgtccaccgaaggtgctgcgtaggttacgttaacgcctcccttcggttcatattcggaaaaaatagtcttggcctcgtcggtcaggcctccgaaatcatgaatcgggtcccgctcagtgagccggacgaaatgggggacaccagcgtccacctcgtaacctaactcgaccaccttcttgatctcggcttcgggcacctcgacggcgatccaacctccctgcacctcaacccgatgggctccggataacgttctcaagatcttaacgttctctccccgtacctccgtcacgtacttcacgacacaccgcgcggcgttcccacagaactcggcctcggagccgtcccggttgaatatcctcatctctacgctcggaggatcggaacgtatgaacaccacgccgtcggcacctacgccggaccgccggtcacacgcccacctcgcgaagtcgggcttatcactctcgggaaccacttcttcctctgtttcatcgactaagacgaagtcgttccgagcgccatggactttccagaattgcatggtacttcccccaggtagtggcagggtttcagaggcagcggagcgcatcgactatctgggtcttagcctcggtcttcttgtccacgtctttgacaactcgcgcgggtacgccggccaccactttactcggcggcacatcctcggtgacgacggcgccggccgcgaccacggctccctttcctaccctcaccccctcgagaatgacggcgttcgccccgatgacgacgtcgtcttcgatcacgacgggtttagcgctagggggctcgagaacaccggcgatgaccgcgccggcgccgatgtgtacgttcttcccgacctccgcccgggaacccacgaccgcgttcatgtcgaccatggtaccgtcgcctatcttggcaccgatgttgatcacggcacccatcatcaccacgactcctttacccaacttcaccttctcccggattatcgcacccggctcgatcctgacgtcctcgaactcggagtaatccgccaacggcacggccctgttgcggtgatccagctctttgtgatagtactccaccgagtcctcgctctcgagcacttcgacaacatcgtcgtgctcgccgatcacgatgacgtggtcgacacccgtgaacaccttggcatcctccaggcgctcctccaagcgctcggccagtccttcgggatcgtccgttttgacgtagaatttggcgatcgtacgcttgggactctcggaaatgtatcgaattagctcttctggatccagctccgacaacggtctcaccccagcagctctaggaagttgcgggcgatccgatccccgccctcggtcatgaagctttcaggatggaattgcaccccgtacacgtcgtagtcggcgtgcctgacggccatgagttctccgtcgtctcccgaccatgcgcacggtagcagctcttcgggcaaggaggattcctcgatgaccagtgagtggtacctcatcccttggaaggggctttcgagccctgagaggatcccggacccgtcgtgttctatcggcgacgtcttcccgtggacgatgcgtttagcccggcggatctgcgctccgtacgccactccgatgcactggtgacctaggcacacccccaggatcgggatctctcccgcgaacctccggatagctggcacggacactccagcgtctcgttccgggtgtccgggcccgggactgacgacgagaccgtcgggacgcagccgctcgagcctggagagcggaaccttgttggagacaactttcaaatcgagatcatatgaggcgaacaaatggtagagattatacacgaaactatccttgttatttatcagaactagtctcctcaaggatagctcccaccatcgctttcattttattttcagtttcgaaccactcgttttcgggcaccgagtcgtacacgataccggcacccgcctgcgtgaaccatcgacggcccgtcgagaaaatggtacggatcgatatcgcgaagtccatatcccctgtccagctgacgtatccgacgcctccggcgtacgggcctcgcttgtacacctccagctcgtcgatgatttccatagccctcaccttcggggccccggagacggttccggccgggaacgtcgcccggagtacgtcccagggggtaactccctcctttctctcacccaccacctcggacacgatgtgctgcacgtgactgtacttctcgatctccatgagccgcgtgacttcgaccgttccgggtctcgagaccttacccacgtcgtttctggcgagatccacgagcatcgcgtgctccgcgagctctttctcatcttcgagcatctcacgggccagctcttcgtcctcttctggggtactaccacggggcctggtgccggctatgggtttcgtgatgatgcgatcaccttccagccggacgagcgtctcgggactggacccgatgatcctccgctcgccgaactccaagcagtacatgtacggggacgggttgatgtcgcggagccttcggtacacctcgagcggatccgcgaccgctcgcacctccacccgcctcgagagtacaacctggaagatgtcccccgagattatgtactccttcgcccgctcgacgatcccctcgaactcctctttctccaggtcccgcttcagctcccccgtccggtgcaccttaggggccgtctgtccgctcacctctcggacacactcctcgatcgcctccgccgtccactcgacctcgtagtcgtcgggatggacggagatcagctcgactctgtcctcgtagtggtcgaagcgcaccaccgagtcgtagaggcacagctcgaaggacggccactccgggtcggcgacggtggtcgatttgacgtccagccagtcttcgacgacgtcgtacgatatgtagcccacgagaccgccgacgaagccggacccctcgaccttcgggattcgggagaacacgcggcgcatgagctggaagtggtcctcatccgtttcctttcgaccttcaaccactaaatcggcgtactccgggtcaccgacgtccacgcggactcgaccgtcgacgcactctatcctaagcgccggtgagaagcctacgaaggagtaccggccgctggcaccgatctcggccgactcgaataggaacgtgtgtgaggacagcgtcctcaaggccgcgtagacctcgtcgggagacctgtctatatctagctcccttacagtcaagcgcacttcatcacacaccctgccactatcggtgttatatgaacttctaagtacgcggcgacggtcaggcctgcgatacaggcggccgtgttacggattacccaactcggtacctccaagttcccatgaggccaccgctcatggagtcggactctgtagatcaggtaatcggccagatgcacgcccatggctcccgcgatgattagtgtcgggaactcgattaccccgtgaggtagtaaagccgcacccagcaggaagaccggaccgaagttctgcagtacccacatcccgaaggccccagcggcgaacccgttgatcgctgggatcagcagcggtccgagcttcaacgtcagtatcacgtcggcctctttgtaccgccgtacgtcgaacccgagcttacgagctagcttcacgagaatcggggcgtacggaggattgttcatgcttctgcggaggacgtcgggagcgtacctcgtcaccagtcggtccagggtcagcgctatcaggccaccgaaggtggttatgagtatcgtcatagtgttccatagggtaatggagagcatgaaccgctccatcggaaagggcagaaggcgtgcgagggcctctaccttctgacacgtcgttttaaggataatgtccgggagagaggggaacatgaagtacgcgatcatccccaggaaccctgaaataaggaagacgtcggctaccgtcacgatgtagcgccaaggacttcccaccgatgcatgcacccccggatgatgagtacggcggattgcggaaatgtgatgatgagggacccagtcacctgacctcggctctgagggtcacgaacaccggccccttgatttcgatctcacctccttttttggttacgtagcgtaacagcttccgaggaagactcaggttgacctgcgaggggcgactcaccttacggaccgacacggtggtctcccctcctccagtcgcgagcagctcctccacctcgtaggccaaccgcgccgccagtccttcttcgaatgacaccccagagtacacgccctcctcgcggatctcacggccgaagtcgccctcgggcgggacggcgtagaggttaccatcgaggacgtaaacgcggttgaaggccgcgggccccgcgagaggttctcccttctcttcctcgacggcgtggactaccacctcccgatcgccaaactccccgcggaacagctcgacttccacgggcccctcctcgtcggcgtgctcgtgaagcccccgcaccacctcacgaaccagccgttccccgaacgacgtagccggcttccgctcgtagtcgatcatcctggccagctccagatctgaaggttcccacggttcgtactcgacgtacgcgagggaacgcacgtcgtcgataccgtggaggaccatgcacaaccgctccacgccgatcccgaggttcatgaccgggtagtcaatcccgtactccgccagcgccaccggtgagtacagcccgaacgtcgctatctccacccaacccggtcccagctcctcgtcctcgatggagtcctccaggtcggggtggtaagcgtacacctcggtctgtgttccgggtacgtagtatttggacattttctcatcgggaacgaactcgaaatcctcgaacccgaactgccggaggatcgcctccgctactgccttcccggtgtccacggtcacgtcgtcgctgaccacgacgcacgacgcggagtggtacgtcatcaagtggctctcgtcctcccgctgctcgcgtcggaagcacctgtcgatggagaacaatttcaacggcggatcctcacgcttcagtatctcggatagcgttataaaccaacccgcggtcatgtgcgatcggagggtgagcggaggctccagcggctcgggcttcaggcgcttgagctcggggaagacctcgtccagtatcctcaccgccgtcccgtcgtccgtgtccagggcctccgcgatctcgtgtgtcagctcgtcaccgtcgatctcgcccttcttgtacgcgtgcagggtttccctcagtcgttccacctcgtcttcggatggctcccgacccagcacctccgccaacttctcgaccttgtccgcacccaatcctacgtccggacgcgggagtccggcgaggtagaagcacctgtccagcacggccgccgcctccggaccgaactgcttgtacacctcctcctccgggatgatgacggggttcacgacctctctgaagcccgcacgcaggtacgcctccctcagctgctgaatagtttcgaacagcggatggggctcgcccgtctccaccttaagcctcgggtaccggtcccggaggccgggctcccggaccagcttagcaccctctttccaggctcgatcgaaatcgcgctgggccagggacctcagttcctccagcttgtcacggtcgaacggcatccgcagtgcccctcacatgccgggtctgcgggccgggtcatggtttttcccggaggtgttaacgtgacggaaccggaaagaatatggacgcggtttccgaagggtaaccgagggtggggcggtgaggcccctccctctgatcgtagcttgtgcggtcgcccttgcaagtcctgcactggcgtgggaacggacggaagtcagcgtggacacgtacgtcctgaattatgaaggcgacgctccgaaccacttgatgttggacgtcgatatcgcggacgagaacggtaacgtgttcgtaggctggctcctggacggcctggaaagtaaatcggaaccgagagtctgggagggactcatggatcgtgttacggtgatactgaacgccatttacgacgacgggaagctgaggcttgagatgaggaaaacgttcacggtgcacttcgattacgatggaaacgacggagtgcacgtatacgtaaaaggggacgacgccccaatcatcaggaccgaggacggccgaacagtgctcgtatgggaaaggtgtcaaagacggcgaatccgaagttctgaggataatggtagaaggtgtgaacggtcggagatggaaggtagaacgtggagaaggtgaatacgtcgtcgtgcactggatcgcggaagggtgggcacggattagggtcaaagtggcggcttcgaacagcggaaaggtccttagggtcttggacatttcgtggcactacgacaaagaggagcgacgagaagagaggcaggaacggggagtcccagtgggcgcggtggcatcgctgacgggggtcgttctcgcgtggatgctgcgatcctcacggtctcggtactgagcctgtgcgtcgatctgaacaagcaagccgaccgactggaaacccaccttccaccgtttcgactctcctctccctaccccacccccttccgttacgtactggcccgacccgaaagtatagaggttcatcctcccatggatcccgaaggcgagctgcggatcgaggtgttaccttcgggatcgaaggtgctgttcgacagccgcgagtacggcgcgcggacggtggtcgagttccgaggaccttacctgatggtaacgcgcctaccagtggtcggattaccgagggacttaccccgagctgctgtgttcttctcggacgggcgtaggaactacgcactgatcagctaccgagacgtcgcgacgggtcgggcctacgtggccctgtgtgaaatagccctgaacttgcacgagctcgtccgcgtaccggtaccgatctcactggacctgggagaaaggctctccgagttcacgctatacgataacggtacgttctccgcgaagtttgaagccggagggggcgaactcgtcgtccggggttccctacgacctcccggcctctccgtcgaatgggacggggagggtgagctcataggggagaagcgacccatactcgtaccggggacgtcctgggcgctgttgaacaagtgtcccgtgatcgtgtttggacagggtacgaacgacctcttgtggccggaccgagagtacttggtatggcggaccctgacatcgtaccggtccgagttggaggacgtcgtcgaggagattgtcaaacgttcgaaacgttcgatagacctgggtccggcgctcctgtgcgcttactcgacgctagccgggctcactgtcgatacactgtctcaagtccggccacctcggttatggagtggtccgtgggcgtggttgggagcggtggtggagaccgtggtggggatacccgtgctcgagtggggagtactcctgccgatcgtcacccgaacgggggagctcatcggaactgtggcaccgacggtcgatcgcagcggggtcgtcacggggatctattggttaacggtcgaatggtacgaagcctggttgcgcagggtcatcatgcggacgtgcgggctatcgtggtgggaaactggtatgctctggggagcgttggacgctctcttcaactccctcaaggaaaggtcgttgaatccacatgacttgatgcgtcgcctgacttttcacgtagcggcttccttatcgccggtcctcgaagtcgctttatacgcggagaacgcggaggacacgggaggcgatgtcatcacgtactacagctcgatcctggcggcgatggtccgatggccggagcagtcactcccgctccagcgtcttctttagctcctcggttttacccgcgatggtgacctcgctcctggtcctctctaggagggaccgggccacgtcctgcttcctcttgaggttggggacaacagccctcgggtagtcgaacgtcatcgtcagcgagtagatctcctccatcacgttgaggaactcctcggccctgtccagatcaccctcccgcagcgcgtccaccacgatcctccggagctcgcccacggcgtccagcagtcccagcaggtaagcccgtgggctcacgttgatctcctcgggcgagggtgccctacggtctttcacgatcgagtacaggatctccgcctcagcgtactcctgtaggtggttctcggcgaatcccgtgcggagcagctcagggaagtcgcccaggagatcgtgcagttctgagaccagttcggcggcctcgtccagcttatcccgggcctcctccaagttcccacggtgcacctcgtacactgcctccgagctcagcttgtggaggtcccgcaggatcacctgcgcctcgtccctggcctcgtccaacgcgtcgagctcctcgcggatgttctcgatggtctcacgcaggttctcgatctcggacacggacgtccccctatggtgaaggtcctccaccgggataagccatcatcgcgctagctccggaccagccgggctacgaagaacccctccgtacggtgccgatgcggccagaacctacgtactcgatccgcccacgggtacctctcgttcatccaggagtcgaagccgggcgagccgaacccgaaaggttcctccacctcgaactcgtcgaactcgcgcaagaagcggcgtaccacggactcgtcctccactacggtgaccgagcacgtggagtacacgagggttctttccaccagcggcgcgacgccacgtaggatcgagagctggccgcgggcatacctcttcacgtgtctccacttgacggtccacttggcctcgggggcccgaacgtaagccccggagctcgaacacggtgggtccacgagggcgaggtcgaacgtctcgtcggtctcccggtagagccgggaggagtccgccctgcggagcctggcttcgatcccccatcggcggaagttacgacgcatctccctgaggcgcctggggttcacgtccacacacgtgagctcgatctcgccttccgtcagcgcatacaggtacgccgacttcccaccgggggccgcacaagcgtcgagcacacgatctccgggctccggccgcagcgcgtaagcggcggccgcggacgccttgtcttggtaagccacccaacctcggcggtaaggctcggtcctgacgggcggtacatcgtgatccaccacccgcagcatgaacggcagatcgggatcttcctccacggccaccccgtcgtcctccagcgccagtatagccttgtccgggtccaccatgtgggcatgtacgcggaggtaacgctcgggctcgcggttgttagcgtccatcaacttcgtcagctcgttttcacccagtaggtccatcaggtgcttgacgaaccattccggatgggagtactcgatcgccaggcgctctacggtgtccttagcccggttcaatacgtcggagagctcgagccgctcgacgtcgtagaggacggcgttcacgaaccgggcggggccctccccgacacactccacgacgatcttcacggcctcgttcgtggcgatcgcgggcttcacgtcgttgaacttcatctcgaacgtaccgaccctgagggcgttcctaacccacgggtccaggtcgaaaagcttcgcgttccgtatcgtcgcctccaggaacgcgtcgaccgtgcggaggcgcttcatcagctcgaagcagtacgcgtggatggtgccccagacgcgatggtcccggactccctcgttcagcagcaccttcttaacgcactcacggagcgaacgtcgcgtctcctcccactcgacgaacacgcgtgccgtgagctcctgtcggctgaggctgctcaacagatcaccccggggtcctagtgacttgtacttggccgaagtggccgggatcgaggagcttagtgccgtcgccgtcctgggtatcggaggcggtggcgatgtcgtcggagcctgtcacacgtaccgatggataagggaagggatcgagccggagcgcttggtcctcggagggctcacctgggagcgtgccgtcgtcgatccggagcccggtcctcgatcgcgcgacgagatcgtgggagacgtcgaatggatccacgagcgtattggaatactacgcggaagggcgaggcctagacggggtcaagagttcgcggagtcacgcgtccgacgcgtgttgaggaggatgggacaccgcgacgtggagatcgtactggtggacgtcagtggaggcgtgaaagggaccgtggacggtctcaaggcgctgatcgaacacttcgagctggacgtcgtcttcgggatcgatgtcggtggggacgcgttagcgaggggtgacgagcccggagtcgagagcccactggccgattctatcatgacctgttcgctgtcgaagctcgaggagaccgtgctcggggtattcgggtgggggtccgacggtgagctgacccgagaggagctccggcggaggttctccgagatagcggctgagggcggttacctcggggcgatcggactcaccggacgcgatgtgaagttcctgaagaaattggcagaggtggtggagacggaggccagtttgatccccctcagggcggctgtcgagggcgagctcggaccgctggagattcgaggagggtacagaaccgtggagctcgggccggcatcggtgtgtaccttttacttcgacccggaagtcgtcgcgcgtggtagtatcctatgcgagctcgtggacggcaccgagagcgtggaggaagcccacgaacgcatccggaaggagctcggcatcaaaaccgagctcgactgggagcgtgagcgggccgagcgctgaactcagttacggagtgacgcaccgcgaccttcctcgtattcgacgctatctgccgaaagtacaatcgtggaggtttagatccacaccgacgtcgagtgacgctgtgcatttgatccctcccatccgtcgttacgataggggcggtcggtcgtgctcctgaacgaggttaaggttcggaagatcgtggagctagcactgacggaagacgtcggccgtgcggatctgacctcctccattgtggaaggtgagcgggcggaggcggagatcgtggcaaaagaggagggcgtcgtttcgggaacgctcccggcccgactgacgttcgaactcctagactgcgaagtcgacgtgctcgtggaagacggcgaacgaattcaacccggcgacatcgtgctgaaagcctatggggaggctacggcccttctcgcggcggagcgagtggcgctcaacttcctcatgcggctgtccgggatcgcgacggctacgcggaaggtcgtcgagagagtccgtgaggtgaatccggacgttattgtagccgcgaccaggaaagtccatccgatcacgggatttctcgagaagaaggcggtatcggatgggggcggagacctccaccggttcggcctggacgatgccgttctgatcaaagataaccacctggcgctggtcgggtcggtccgggatgccgtgcggcgggcgagggagcgggtgggtttcaccaaagtaatcggcgtggaagtcgagtcgatcgaagacgccgttgaggccgcgaaggcgggcgcggaccacgtgttgctggataatatgaaaccggcggagatccggcgggcggtgaacgaagttcggaaagtccgtgaagatgtgatcctggaggcttccggtggcatcacgcccgagaacgcacccgagtacgcggaaaccggagttgatgtgatctcgctcgggtggttgacacactccgcgccggccttggacctgagcatgcgggttcgacggatgacatgaagagtgtcgggatatcctcacttccgagaccggtactcgagctcgcggacgaaatcgctcaaggtcatcacgaaccgggcgtcggcgacgcggtgagcgtacgcgtcgggatccggattgacggagaccacgaagtcggagcggaagtcgacggcgaatgtgtcgtaagaagcgccgacgaggaccagcagttcctcctcgacgacgttacccgtgttgacacccgtcggcgggatcccgggcaggaacttggaagcgtgtttggtgcagtacaagcggacgtcgaggcctaagctttcgagaatttcgacgaggcggtccagtgcatcccggtcgtcattgagggaagacgtgaacgccggtaggtccctcgaaatgtcacctagcacacccttaccgacgactacggcgacggtgtcgtagaaatcaatggcacggaggagctcgtcccaatcggcttcgccggtaggttcgacctcaggctttccaggcggatggctcgagagcagaaggtcctcggtgaggactacgcaggcgagcctgtgctcatctcgggaggattcggcggcgtcgaggatggtctcgtagatatcatcttgagtctcggggatctcgacgcggagtttcaggtcgcgtaggacgtcggggagctcgacggagcaggtgtaggaaccgcggccatcggcatccaagccgatgatgaggagtccgggccagtcaccctcctcggctaggagttgggcggcgacgtaggcacccttatccttgagcacggcgacaccgtagccgtcggcttgggcgagaccgatcacgatcccgaccgcgtcgaactcggaggcgacgggtacgacctcgaacggatgatcactttcctccagtgcgcggacgacctcgttgagcggaaatcccggcaggtacgccacgacgtcgggttcgaggtcgtgaagggcgcggatgacctcgtgtgaccctataggaaggtaatcggtcgacatctcatctccactagactcggtccttccttccgacaccgcttcagcacctccagtgcctcttcgacgctttcggcgatctcggcggggtcgaaacccatggaacgggctatatcggccggcgaggtgtgaacggccgggttctcctggcctcccgtcatcccccacgccgcatcggtcacgaccaccaccgtcaagttctcgaagcgatcgcggttctgagccacggtagccaaagtgtgtaaatgcatgaagaagccaccgtcgccgacgatacagtagaccctcccaccgtcggttccgaggcagtgacccaacgccacggacatcgagccgcccagcgcgccagtgcctccgtccggatccaagcctaccttggccgcggcgatggtgtgatcgcctaagtccacgatcacccgatcctcctctttcaagaccttccgaagtgcgaggagagcttcctccggccgcaacgtcgttccctcactatcattccagcaggtacactatacccttgtccagatccacctccacttcgctaccctctgggggcatgaggtgctcatgctcttcgccgtgacagggtgcatcctcggggatctcgggctctactaggaggtcctttacatcatcgtcgatgggtttcgcctcccttacaacggggatggtaccgtcctcggagagcgtccgaacgtctccggtacagattatggcaacggcacccatcacttcggggtacgtgtcgtaggctcccccgaggtcttgggtgaagactgcttgtccctcttcgatctcgactatgcggtccgggtgggttatgtggatgacctcaccgcttaccttacccttgccgcgcacggtttcccctcgcagcaccggtgtcggcaagtcggttcccccgtcagctcgggaccggcatccttatttgggttcttcattccggatagcctgcgacacttgccctcggaggggtagtccgttggaagagcgaatcagatgcgagatatgcggacgcgtgatcaacggtcgacctaaggtcgtgaaggtggaaggatcggaactgcgggtgtgcgaggagtgtgccaagttcggtcgtgaggtggtcaagccgcgacctcgccgtgagaccggacgggtgcagcgtgagcgccgcccacggcgcagacccaccggcgcgagacgaagaccgagagggttcgatcccttcagcgaggggctggaggtagttccggattacgacgagcgtgtccgcgaggctagggaacgtagaggttggagccaggaggacctagccaagaagatcggagagaaggtttcggtgatccggcgtattgaatcgggcaagatggaaccggacgtcgagctggcgcgcaagctggagagggtcctggaaatagagctcctagagcgggtgagtgaagaggacaccggatccgtggggatcgggagcggcgagctgacgctgggtgatgtagtggagattaggaagaagtgagcgttacaccggagacgtgcgaagtatcagcgtaaccacgacgatcgctagggcaaccgagaccagggcgaatccgtaagttcgaatgtcgatgtgcgcgctccgacgctcctccaccacgcgctctgccactttcatgcagagctcccgagccttatcttcaacctcatcctcgtcaccgttcgcgtatattcgtagccgaccacgatcgctgtcgatgacgaggagaacgtccgcttccacaccccgctcgtagtcgcacacttctttgaactgctctttgaccagggagagcacctcgttgatcgtgtactcgtccgcgggaacgtccaggagaagcttcccatcgacctccgtgtcttcatcaactatcgccacatcacaacgcttgatcggaagcgattcctcggaagtttcgagtttctcatcgatggagaatttattgagataatccttaccgaacaggatcaccttcccggtttctttgcacaccgaagaaaggacacctttgttgaactcgtcgatgtcctcaccgaccactatcaccacatcgttcttcgcggacttaacgaggctcattacctccggaatcgtccagcccctccttaagaccagtaacgttgcccgccgtctcacttactccaccctcgacctcttggagttcgtctaccgggatgaggatgggccccatctccttaacttggactattttgtactccttcgggagcgtgtccacggtatcttccacttccgacccactgacgttcaccttaacgccatcgacgtcgtccgtgctgtctacaccctcgaacttgatagttaccgtaccagcgtacgcccggccacggagttccgctgttacgggcgctggttgcatcaggattatctccttaatggcactaatgatggcttccttcagccccgtcctcctcgggatctttacggaatcttcgatccggccccctacttcgaggtaataccgaccttcgggggctcggaactcatcgatgaccactttcacatcacgaccggagcactgctgacatagggcggtatcgcggagtacggagaccgccaccacacgcatgggtcccgcgagttgctttccgatgtgtggtatcttcgaagcttcgagcatctccactctgggtactatccctaggtaatcacgataggcatcaagaatagcttcccgaacggccgtttcagcctgatcgagcaagactccgcctccgtacaactcgacccgctccgggacgttcatgtctaagctcctgatgatactcttaacggccgacctcacggcgtcccggacgtactccgcgacctcttcgatggcctccaacacctcacggcgggtaaggtcgtaccgtgagagttccgaatcggccatcggcgaattgatcttctttttgatattttccgcttcttcatatgttagtcctaaatcattagctatggctaaggtaaaatcacgtccgccaactttaatagaatgacacacttccacaagtgtgttacgcacaacggagatatccgtagtacctccaccggaatcaattaggaggcagttctcgattttgtaatctctgatcgctttggccacggcgaggggttcaaccgatatcgtgattaacttcatattaaggagcctagcgatgcgctctaggttattaatgagccccaagcttgtattcgatactatggccctgaactgcaagtgagtgacttgagaaccgatgagaccgtcggggtggtctgccccgagttcccttgggtctacctctgctccgtcgaccttgagatccactatatcgacggagataggccagttttcgggcgagaactccaagcggtgcgctagcgtgtatcctatgtcctctatgcggagctttccttcggggctcacgctcgcctccgcttccaccatagtgaaccggtctcccgtcatcgacaatccgataccctctacgtccgaaggactgacccctgcatcacgaagtgcttcttctacggttttcttgactatccggctcacacccttcacgtatctgacgtttcctcgctccatgatcgtgggatcgaggatgtaccgctcgctgtaccccttgaccatcaggttaccactcctgagtcgccctacggcggctgagatcacctcggtacccaagtctacggcgaccacgtgcaagcgatcatccctccatctgtccgagttctcgctgcttggtccgctgtctctctacgatctcctctaggtcgatatcgtgggctgtgaggaacgcttcgacctctatcaataggtcacccagctcctcaatgagtgcttcccggttgccggaacgtaccgcgttcctgacctcgatagcctcctccacaagtctcgcgccggtggacacctctaccgcccgatccttccgcggcagtaaccccttaaggccgaggatttgagaacgtattagatcaaccgacttgaaccttctgacggcctcagctacgaggttcaatgtgagactcccctgtacacgtaagcgcgtcgtaaatcgtccagtcgcagcacctccggtacgcctaaccccggaacctcgaaggtatagctcacgacggtagctccgcacgataccagctcctctgatatttcctcgaggagagacggcattaaatacacgaatacgacgtccggatttaactcccgcaggtcgatgtcccggacgtcagaatgtataaagatggttttatcgtctactctaagtgtttcggattttgcgcgggctaactcgagcacatcctcccgtacgtccacccccatcccttcacacccatacaggtaggcggccgagatcacgaagcgaccgtctccgcagcccagatccaccactctatttttaggagttaactccagctttcgaaggatctcaaccacgatctcgatgggtgtcggtacgaggtatagctccgttggacacgtcaccacgtggtcgtcgctccggtgatactccacctcgttcgggaactcatcgagcagtctctctaccttccttttccctatcatcttcgatcctccgcttaggcgagtggtatccgcgaagctcctcgagctttccgaacctgcgggctattcccctgtacacgtcaccgtgccttggggttataacgatcaaatgggccgggggatggatttcagagatcttccgaataacttcggccggttcaccttctacacgagcgaccgcggccactggataccttctccgcacctcacccaaaagctcccgtactatcgtgtcagcgacctccggatccataattctcggtttgcccaagattttaatacccgcgtacctctcgatatccgacaagcttgtgagtatcttctcgtaagaatccgacctgatcaccacgaacaagcttcggtcccctcgctctcccgatgctggggggtttaacctgggcgtcagggtgaatatcgtcggtgtcgacgtctcgggccgacacgcggaggaggacggtcattataataggatcacggcctgcgtgtcggccgaggtggatgggttcaatgtgtttacggtcagagatgtgaacgtgttcgtcgtatgtactcgcgagcccccgaacttgcggacgctgaccgaggaagtctcccgggcccttaacggcctggacaaggacgatgagtacatggtggtggcggaaccgggtgagttctttggagaaccggagtggagggtctcggcccttttaggggccccgttcaagtacgccgagaccgtggccgagcgagaggtagtggaaatggcgcataagctcgcctacggagtctacagaggcgtgaagatggggttgaaggttgcccagtcgccctcgggcggttttggttgaacggttggagtggagacaggagagccgcattgatgagctgaaagagctggccgaatctgccggctacgacgtcgtcggctcgttcagacaggtccgtcacgaagaccctcgataccatataggggaaggaaaggtcaaagagctggcggagttcgtgcgcgagaacgacgtggacaaagtcatcttcgagaacgagatcaagccagtccaggcgttcaaccttgcaggtgagctgggagttgaggtaatcgacagattccagttgatcctcgagatattcgcacagagagctcgaacccgcgaagccaaactgcaggtgaagctcgcgcagctcaagtacgaactgcccagggcacgtgagatggtgaacctagctaaaaaggaggagcgtccgggtttccgcggcctcggtaagtacgaagccgacaaatacgaggaaatgatccgacggaagatcgccaagatagagcgtgaactccgacggatcgagaaagatcgagagctaaagaggaagcaccgacatcggttagggttcgaactagttacgttggccgggtacacatgtgcgggtaaaagcaccctaatgcgggccctaaccgacgagacggtctacgtggactccaagatgttctccacgctggataccaaaactagagccgtagacctggacggacaccgcgtactcctcaccgacaccgtcggattcgtggataacctaccccactggctcgtggagtctttcaaatcgactcttgaggaaaccgcccaagccgacctggtcctgctggtggtagacgtcagtgacgagttaccggagatcaagcgtaaactccgggtgtgccacaggacgttggaggagataggcgctgaaggccccatcgtgaccgcgctcaacaaggcggatctgataggatgggaggaagcggagcgacgcctccgggaactagaagggtacgtgtctcatccggtggtcgtttccgctaagacaggggaaggcctcgacgacctcaaggccgagatgcgtacggtgctctccaggtactggaagaacgtccgcatcgagctaccgatgaggaacgaaaccatgcgggttgtttcgaaactacatgaactcggaaacgtgctggacgagcgttggtcgaacgacggtgttgaggtgttcctcgaggtcagtgagaaggccctgggaaccgtgagaggaaccgtgaaggggttcggtaaagtggaggtattggattaatcctcacgcgaactcttccggtaccattccggaacttggatcagtgaataacccccgtcgggaccgggctttccgtcgatcttgaaacccatcttacggaggtccttcaccctattgtggacggctacgcggctctctcgattgatgtactccttaagcagctcgccgctcacgtagttgccggttttggtgtagataccggcctctttcagtatctgtttcgcacgcttttcgcccacggtttttgagagctgatctagcagcctgttcgcctcctccaacacggacagaatgatgaggtgacctgcgtctatcttcacgcctttctcgtacgctcgcttcaagaactcccacagatcgcctctgggacgactcctcgcgacgcgctccagcctggactgcgtgagtacggcgatctcgtcgtcacgcgccacgtcgggatcacccccgttccgtcccctataacgtttcgaggattttaactttccacgccgccgtagggcgttacatacccctgagctcgcgtctgcgcttggcgaccttcctggcgaccacggcctccccgagcctgaacaagtaaataaagaggttttctagaccacccatgagccagagtacgtatccgaacgttctatcacttatcttacgctcgaactcctcgggcgtaagatctcgatttagctcacggttgaataccatcgtggcggcttcgatgaactcatcccacgatatcccaggcacgttctcgtgaatcttctccagtaggtcccgcgccggtgtgtcgtagagattcgacatgagctcgacgacagtcctgagcgtaacgacaccgaccacccgcatgtcttcctccagtgggacgagcgtgaggtcggagtccgtaagaatttccacggccttcgtgatggggtcggagggagagatcgactccggcgatcggcatacctcttcaactgtctcggcgccagcggtgagtcctcgagcgatgtcgttggacgtcactaagccgaccaaacggtccgaaccgttcactacgacagccgtgtactcggagtacctcgtgagctctcgaaccgcctgctcgagactgtcctcgggtttcactctaggatactctttagtggcccacatctcggccctcatcacacctcctccctaacttccttgatctttatcgcaccagtcggacaatttcgagcacactctccgcatcttatgcaccggtcgtaggaaatattggcgacatccccttccatctcgacggcatccactggacagacttctacacagacctcacaccctatacacatatcctgatccaactcaatttcacgctcgaattcaggcggtgttaaggtacgctcaataacgatggcatcgacgggacatgcatgttcacaagctttacaacctatacatttatcctcgtctatccttaacttatcaatatttggtgcctcgacaggacaaatctgttcacaaagacgacaggctatgcatcgatcttttctcagaattgccttcctaagtacgaacttacgtcgtattacatcaacttcctcgagctttacttcaatgctatctttagttactcgggcttcaccggataccaccttgatggcatctacggggcaagacttagcacataaccgacacctcacacatgcgtcgtgatcaacctctggaggattggtgctgtccggttctgttagcgcgtctaccgggcactcttcgtaacatgtcttacaccctacacatcgctcggggtctatagtcacgaactcccgacgtacggctggtgtctcagaaagtacttccaacactgtatcttcatcagcgtcttccacacgatctaacaccatttcaactaccttatcgatcgaaatttcaagcgttttcatccccggaatccccccacgggttcgatagcacgggacggacagattcgaacgcactcgagacatcctacacaccgatcaacgtctaacttagggggagaccctttcgctccgaagagcgcttcaaccgggcaggaagaagagcacgcttgacaaccgacacatttggactcggatatccgcacgctcacttcgggacgttttgtcaggacctcgattcggtaacttcctttgggaagctcacatgtggcacggccgaggagtatggcatcgaaaggacatacttccacacacaagccgcaccgcacacagtctttttcgtcgatcttagcggaatcctccacctcaatcgcgcctgtgggacactctttctcacaaagaccacaggcgcggcatagctcgtgtatcacaacaacttcacggacctcgactatcacgtccactcaccacctcagccatgagctcctctatcacgttcttcacttcgaactcgatgacacggcgtatcatttcctcagacatcttgcgttctaaaagttcggaaagcttctcctcgacgtctctttcagtcctcgtagttgagccgaattcttcagccgcttccagcatttctcgggttaagatgccgaggaacgcatcggagatccgagaccgcagcacttcacgctcggcctcctccgtaggtacgcggtccacggccgatgtcggacaggcgtccgcgcataggccgcatcgcacgcacaggtcgggcatgatcacaggcatccgagttatctcctcgatgcgtatcgcatccaccgggcagacatcgtagcatatacgacatcctatgcacatgtcaggttgtatgtaaaacacttcgtcagtacacttaggtcgtggacgatgatcgggtcgtttcagtgcttccgtgggacagtatgccacacaattataacatcctaggcaccgttcagggtccggatctccatctggcacgttatcagcggcacctgttggacacacctcgtgacaacggttacactcaacacacagttccctattcagtcgtggattgcttcgacgtttgagctgaggtacctccaactctaccgtgacactaccataaggacaaacttttacacattctaaacacccatgacatgcgtccaggtctattctgtgttcttcaatgatctcacgcataactccggtgggacatacctcgatgcagggcctattttcacaacgatcacatgtacggagatcaacaccaatgaacctcacttcaatatctgccttagggacacgaacgggtctacgtttcggctttaattccgtgaatgatacctcataaaacctgaatacatcccgagggcacgcctgtacacagaaagaacatgcaacacaccgatcctcatcgagccgcacccgctcgtccacctcgatcgctccggtagggcagacttcggcacagaggccacatcccgcgcactcgtcgggccgttcgacttccacgatgttgatggtcacgttacgaagacgatcctcgaaggagaagtgaagatcgaccaccaccggtcacccccggagcgaagcttcgaggtactccttccaccgcttcactagctcgtcggtgtctgtaggaaccagcttgatggcacccgcaactgggcagacttccagacacacctcgcatagcacgcagcgctcttcgtccacctcggcagtctcctccacggtgatggcgtcggacggacaggcactctcgcacttaccacaacctacgcataagtcactgtcaacgacgatgcgggcgggcttgggcggctgaactcgttcctcgacctcctcgtgaagcgtacccatctcgatggctccggtgggacagacctccacgcagagaccgcagcggatgcaccgttccttgtgcaggacgggtccttcctcggacatctccattgcgggcggacatccgtcccgtccttcgactggacaagcgtcggcgcaagccccacacaagatgcaccgatccaggtcgacgtccgggaagtcccggaacctgggaggtctttgcatgatctctcgggaggtgtgagcgtcgagcagacgcttggatccttcccggctcaatatgtggttcaggaagtcctggagcaagcgcggatcacctcccgcgccttcccttctaagagaaccttaccctcccgttcatcgatcaccacgaacctctcattgcacgcgacgcacgggtccaagctcgcatatgtggctacggcgtctgcgatgctaggagatccaggcgctatcgcctccaggactcggatattcgggacggaaggtgtgcggatcgtaacgcgcttcacgactcctccaggagctagttccatatcgtacacgagttcccctcgtggggcctcgacgcggttatcgacgtgtcccgcgttcacctccagctcccgtcgatgcctcccttcgggcaactcatcgacgatccgctcgatgagctctatggactgcaaacactcgtcgtatcggaccaagatcctggcgaggttgtccccctccttcctgtaaacgggcttgaagcccagctccggataaacgggctcttggagacgcatgtcagactcggggactccggaagccctagcctgcggcccaacgactcggtacttcctgatatggtccttagtgatcaccccgacaccacgcgatcggagcttgatgaagggatcgttcttggcgattcgtcggtacgttatcacgtcgtcacggattgcgtccagggtttcgaggacgttgttcagttggtcctcggtgacgtccattcgaacaccaccgacgacgttccaacccgtcaggatccggttaccggttatctcttcgatgcagtccaggacgcgctcacgagtgttcatgttccacacgaacatagtctcatgctctatcgagtagaagtaggcggcgttggcgatgaggtgggattgaatcctatctagctcttgcacgaggacgcggaggaacaatccacgcggagcgggatctccttcggcgagtttctcgacacctccgatgaagcacatgttgtgcgcgtgggagcagattccgcagactcgttcagcgaggaaggcggccttctgccagggcattccctccatgatcttctcgataccacggtggcagtatcccatctccaccttgcagtccacaacctcttctcctcggaccgccagcttgatccggaggggctctttgaggatcggatgattaggacccacggggacacggtgtgatatcggctcgatctcacccgtctcgacgtccacgacttggacgttggattggatctcacgcctcctgcgcttcacgggccccacccctacggaactcccaactgcggaacaaagcaggaagcacgtcgacgaccgcggagactatctcctcgggccgtggtggacatcctggaacctcagcgtctacggggatcacctcgcgtaccggcccacatacgcggcctcctcgctggttgaagatgccgccagagcacgcgcaggtgcccacagcgacgacggccttgggctcggggaccttgtggtacagcttgactagcttatctcgccattgatacgtaactggtccagtaactattagaacgtcagatttcctcggattattgtggtaatagataccgtactgttctagatcgtatcgataagtgtagcaagctaaaatttcaatatcgcatccattacacccaccagtgttcactactgtcacatgaatagacctagatctcacaaaccctttcaattttttaagcgctgacttcaggctcatataatccccctctcacggagagaagtgaagaactttgttaattccttacggtctatcggcacggattttcgtccttcaaacattcgcagtagttcatcctctagagcttcactaagtttcccatcactaaccacatccataagcaccgctaaagtgatcacttcatcgtcaacgttgtccagaagtcgctcagcttgttcaacttcggagtgtaacccatagagcccggaacaagaccgtgctctggacagcacgtcgatcacatggtcctcgtcgacgttcaggagctcagccagacggtgcacgatatcccgacgatatgcgtaactggtgagaatccacttcttgatgcggagtaccaaattcggatcttcagcgtagcgctcgtttaggtcctcttcagtgatattcttacgtcttattaggaaccgcatcatcgcggtcctaacccctcaagccaggtaagagcggcgagaaaagtcgcaattcctaacacggtttcaattcgtccgtaccctggtcgcatgttcaccacatatccgatcaggaacgcggctatccagatccctaccggcaccgatcgcatccaggagacggccagaagtgtccatcccaataccgccagcagtagactgatcggatccactctccgctcccggaagatctcggggtacatacggtagctgtactcgagacccaccaacgatcccaccaggaacatcgctacggcgcccgcgatcactgcttcgacgaacatcctgccctcgaaaccgatcataggtgacccacccttagcgcgtgtatcgagacaccgaggatcagcaggatcgctgccaccaccgccagttgttcggttctgtgtaatacgtgctccaacctggcgcaaacgaggaagatgaccgatgacgctagcagcagcactcctccggctttagcgtagatcgagtgctcgaggagcaggatcgcggccatcccgaccagggacagcgacagtacgcagaggtgcgagcgcaacgggacccccctatccgaggaccaggaagtccaggaacatcattgaggctattatcacgtggaacccgacggcctggtacggattcagtatcggcgtcagcgcgcacatcgaggccaggagtagcgtgaggacccccatggtcaggaggtgagagaccgggtcggatatccccaagaacaccgcctggaagacccagagctcacagtagtacttgatggcttcagccacgtacatcagcccacgcaggaaccccggatattccgtgaggtaaccctcgacgatgtcgtatcccttcgaaggatccaacggggagtaaggtgagtctacccacaggagggtgaagaacgccaaggccgagaacgggatgtgttctatcagcgggccgtgagcgtgttcccacgccagtatgccggttacatccatgtgccctgttacgaagtacgccgatatcagagaacaggccagcgccagctcgccggcgggcataatggcgtgtcgcacaccaccgatcttggtgtaagtggaacctgaggacactccggcaccgtgggagagaaccttgtaggacgcgtacagggcgaagaacgggagcaaattaccccgatacactgccgagatggtgaccgcagccgaccagattatcacgttgaaaaccggcaccatccagtacaggaactccgccgaggtcagtggggcgtatccttccttgagcataaacttcaacgtgtggaggaactcctgaactatcggcggtcccggcctacgctgaatgcgcgccattaccttccgatgcagtccgaggaacacgcttccgaccaagaaggcttcggtgatccccaccagcgtttcgagcacgatcaacgctcagtaccccaggaaaggtgtcctatcccgatcacctcgaggcgagagcgcccatcctaggacgaagatcgtgagggcgatcgccaggatcgttagagcagagaacactccgtgatatctgtccacgagccacggcctggcgacatcagcccacactagtgtcatgtccgccaccagtaccgctactaccggtacccaccgcacgccaccgcccccctagggtaaggccgcaagcaactccaggtagcgggagaacgtcaacagcgtcgtcaggtgtatcacgaaggcgtatcggccccagatccgccggaacgagtccaccttaaccgcgtagaagggaccgactccggcctctccgatgacccccgccgttaacagggccttaccgtaagttaatgtccaacctcccgctcccttcggcattttcatcaactcatggacgctcaaagtacccgtagaggcgagtattagtgccgcacctccgaaaaggggtaaactggctatcaaacacatgagaccgtagttgaaagcacactccagcgcgaactcgtcctcgacggtggtgcctatcagccccatgttggagattccgagcagcgaaaggaacagggtgaagttgaaaacgtctccagtggtcactacgccggtggccgcgagggtcgagactagagccagggccgctttgatcttatcctcccgcgggctgacgatcttggctttaatccggggcctgcggtggtctatttcgacgtacacgtcggtattgctgaggatgggaagtgcgagaacggcgagaaggaccgccaatatgatcatgttaatcgtgcttaggtatggtactatgtcgcccagcggtattatgaaaagtaccttaccgctcgggtacacgtcgtcgggcccccgctctcacatcgtaacccatggcgtagcccagtagcgtgagcttgggaccgaccttgacgagtattccaccagtacccgccaagatcagggctaggagccacgccttgggatgtaggaagaacgtgctgaaaccggcgacccagaacgcccaaccgatccccgagattgactccatcccgcgccactcctcgtagtgcggtcggttcgccctggagaacaggtagaacgccgctcctgagcccgccacggctcctccggtgaagcccgtaagtagcaccccgtagaccaccagcccgatcatgatggccgtcggcgccgtgcggaggacctccatgtccaagggttcgaactcgggtagggaatccccatccgtgtatcgggcgacgagtacttccgccgtagctatcaactcggccagaccgaccaccagtccgggtagaatcaagcactccgctaggtcggtaccgacggaggctaggagtgtcaacgagccgacttccagtgcgtcggtcatagtcagcctgttgagcggattgcgatccgccgcgatgtcgactgccgcgatcagacccaccgctattccggcagctacggccacgtggtacattttcacggtgatctctgggacgacgtgagggactatcattcgccgccctccctctccatttcctcctcgccgatcgtcttggttcggacgatccacgagaacgtcacgaaagccacgaacatgatggacgattccaggacagtatccaagccccgcgtgtagtagaggatctcatcgaggatgccaccaggatgggacacgatcgtcgtaccacagtgcctggagttatgggccagccacctggtgaacggtgtcaggtaggaggtgacccacccgcggacgggttcgaactgggggtactgcgagatagtcactcccggactttcgagtgggactcccccgcgatcgtagggggcgagtggatctccggccttcatctgaacctgcggcgcgggccgagggtagagctgctcccgatggtacgaatgtccacaatgcaaacccaagagtgcgagtacagctaggagaaggcagtacactgataccatactttcaggccgtctaatcgcgttcagagccctcgagaacttcgcggtcacgctcactggcctccaccctcaatatcgccctcatcaatatcggggtcgtaaaggcgccgactgcgatgaacgtgatcagggcgagtaggtggttgaacgctaggaataccaggcacacgcctaccgttgccagttccaggttgagagatttcacaactggatctgaacgagcaggtcctatcgccgcccctagcgtgccgaggattatcatgaaagcaccggtgtataggatggcctcgcactcatgcacttcgcctcacctcctcaatccggatcaggtacacgcagaacattatcgtccctaccgcctcgagggccacaccggcggcagcgacgtcgaggtatccctccgcagctacggcgcagatcatacccgatttaaccagcgcaatcgaaggaagcttctgaagtgggtcacggcgtaacaccgtggcgatcgaccccaagacgcaggctgtgagcgacgtgaggaggagccagttcaatccaactcgcccgcccttctgatctcctcgatcttttggatcgtgtaggagacggcattggactcgagcgttgagaagatgaacacacacagggccgctatcagacccatgtcggtgcgccacgtcgtcgctacgagacccgcgagtccgaacccgaccacgttgagatagagcatttgagcgtaaagatccctcgccaccaggaggcgcagtgacatcaggattacgatggccgccatcaccgcctgtgcggagatcacttttcggcccccctccccatccggcgtgcgatatcaccgatcaaccgggacgctcgagggtggtcgatcccgtggatggtcatgatcgctatcaccattccagcaacgaagttggcaggatccattccaagcactttatcgtagagggtcaccaacacggtggccgtgagcgacccgagggtaccggcgtatccggggtcggcacacagacgattacccaagtacaccgctagagccgcgaccaacccaccttccggtcctcctaggcagtagtaccctgaggaagccagtaaggtaccagccgacgcgtcgggtgaacacactatgttgcccatgaaatagccgccggcgatgtcacctcctcggcgttcgactgagcgcccgatggcttctgcgcctttaacacctggagcttccggcaatcccataagtatatctacgatgacgaagttcagccacgcgaggactgatccgacgactatctgcagaatctggagtccttcttgcagtccgatcaccccgcctcgggtcgggggaacaccttctcgatgtacgcggtgaaggccgccgacaacgccccaacgaccgcgcctacgatcgcgagcggtatcggaggatggtacccgatcaccctgatcacgagtactgtcgcgccggcggctatcaccggcgtgggaaacgcagccgagacttcccatgacttcctgcggggtttatcgcgctggatcggtggtagccccagcgctagcgccgtcccgaacgcaacggcggccgccactcccacagccactaatccagggtctttcattttaaggtttcccccaacatctcttgggcggttcccgaagtgggggtttcatattgagtaagatcatcatgcgacctcaggttactatcgaagatgattggataatattcgagggcgaagagggattcgtaaggcttccaaaggacccatataaggttatcgaagactttgaggagtatggatacttcttcgacgaagaacatcggcgcgactttgcggccatgtacatgacgctgatagtcgaacaaacccccgtcctgctcgtcggtcctccgggtacgggtaagacgaagctcgtccgtcttatcggcgagctgtacgacgttccagtagtggtcatgcgtggccaccaggaggcgcgagagcaggagttcataggaggtgtcgacgtggccgccctcccagtcgccgataagatcgccgaggagtacaccgaggtcggaaatatggagtacgaggaggccattgaggcacttaaggaattcatttacgtaggcggctacctcaaggacgtggtgaacgacgctcgacgccgtggagcgtgtctgttcttcatcgatgaagttaaccgattcccaggttatatgatcccaacgctcatccatatcttcgaaaaagacaccgaagttatctacatcccgcactccccaatcgatttcggggaaacgggagccataatgcgaataggcgcgctcaacccagaaggtaaaggcactactaacttcgacgaagctcttctaaggcgcgttgaactcgtcccgtggggcgaatacgacgtagaaatttacaaacgtatagccatcgagtcagctcgacagatcatcgagctgactaagatggccgaggaagtgctggaagatctagcgtccctgatcaaggacatgggtaaaggtgtcgacgtcgctaaggacgtggcgcagacggtcgctataggtattaaaatgggatacgacgtggatacagtcgccaggaacgtggctaataagatcctgggcgatatgttattagactctgaaaaagccgaggagttcgaggctcgaaggaacgccctagaacgtaagatcaaggagaagctcaaacccgtgtttaagtcctgactaacccgaatcgggtgaaaaggcagccttgactttcaaaaccgaaatacgattggaagaggctaccgaagtagtaggagagcttatggagcgactcaagcgtaggggcgacgtccacgccccgcccgacctacccgagggatttttccggaagctgaccgtattagcggatggtgactccgtagacctccagacgttcgtagacatggcgattagacacttcgcccggcacggctacaagaagccgctcgatgcgtacgaacgcgtgatggtggcacgcgctatcgtagcggaagaactcgctaagattctgttcaaggaggaagctgacgaagaagccgtcgagtccctccggaagttcatcccacacgcgagcgaggaggttcgtgaagagctagagtcactggtcgacgttgatgaagcagacatccgagaagaacccaaccgggaagatctcgaacgtgtccttgagacgttcggttcgcagctatccgacgaggcgatcatggacctactaaagaccgccatcttcggacccgagaagaagcgcatgcttgagaacattaccgatgagcagatggtgggaagcctccttcagcagcacgttccacgttcggtgatcgagaaactagccgagcagggcagattagacgttctcaaccgattagggtcacccatcgagagcaaggtcgaagccatagcctcacctcacgcttcggactcgtactcgacggatcaagaggaacttgagaaggcgttctcggacgaggcgttcaaccggcaggctcggcagatgttctcggagctcgcccgacggctcaacgaactcgccgaacaggtgggtgttgaacaagccctggagcgcgctaagcgcgtttccgaggccatccaagccgccaacgaccgatgggagcgcgccgctaaaatgtttgaaagggcgatagagcggcaactcaccgaacgaggaccgtcgtccgaccctgttgaggcgtaccgtcgtggagcccccatggacccgaaccacgtcaaggatgaagtcggccaagacccgtcggactacacggcatcgctagaacaggctcaattcgtggtcgaaggtatcgagcgacgtggcaagttcaggaacccactcctgagcacggttcaggccaacgacatgatcaagtcgatcccgaatctctccgacgaccaattccgtcagcaggtgaggaacctattgagatccacgatgggagagctcgaagagtgggcgaaggacgtaggacaggatgtagtgcgacgagttctggaagagctgaaacgagctgaggaacatgggtactacgtaccggaggaactgaaggagcggatggaggagctccttcaagacttgcaggagggaccagaggagcgggaagctgagggtgacggcgaaggtccttcagccggtgcttcggagtccccttcgttcgtatccgaggaaggaggcggaggagagccaaccgaaggggagagtggcccgacaccgacggagagtgcctcaggagtcggcaagggtggagatcccgccttcacgatcgaccgatcgttccccgagcgcaagaagttcctcaagattctacagagcgaatcgctgaagatcctggatgaaggtcacgagatatcgcgcgagttcgaggacgtcgaggagggagaagcgaaggcgcacttcgggtggctgtacggtttcgataaagccgacttcctgtccgacgtggattgggagcgcagcttggaggagggttacttcaagaacgtcccactcacgctgtaccgccgtgagttccgcaacaaggacgaaccgaaggtggccatcctgctcgactcgagcggatctatgagcggggacaagatggaggtagctgcgacactggcggctgctctgttcgagaccgtggggatagaaaacatcggcctgtgggcgttcagatcggaggtccatcaactcaaggacttcgaagaagtgatcaatcgaaggaagctcatcgagaagatactagggatacccgccggaggtggtaccgaccccgtaaaaccgctgatcaaagtgctagactcactagaaaacgtggattacgataaatgcaagatcatttacataacggacgcaatattcatgcacgatgacttcattcggatcagaaacttgctaagtgatcgtgacgacgttgaactgtacgcgctactaattaaggacgaattcgaacacacgggaccaacaattttcaaacgcataacagaagaattcgatggaggagtagtccaggttaatccgagagatcgtgaaggtgtccgcgagaaactccgtcagttcgttgacatgatatcggactagccgactaacgcccgctccactgcctgcattgtttccatggcatcctctcggatatcctcgtaccataccgagcattcacgcctgctcgtttttaccaccatcctatcccggtgcaagctcacgttaatcataccgcgtacgtccatgcttaggcttctgaggaagttatgagctagaatgatctcattaacgtagtctggatacagttctccgagcggggctcgatacgagataccttccttttcccaactacgacgaaactttgtatggaactcacggaataggtacttcgagtaattatgttcaagtaatacaacgtcagttacgccagcgtgaatcatctgtgatgctgcctctacgctatgccaattttctaaaatggattcaacgctctttgggaagaatgcctcacagcccagcgaattgacccaacctaccgcgcaactaacctcaagttctttcagtctttccatatattccttgtacgtatcatagtgacgatcatccacgaaacttatcacggccatttcgtcgtccattttcctcgtcataaacgtcttgtgcgtcactcgaaactttctgatccccgatcgcatcagctgagcgatgaactgcgtcgggatcgctgtctctgcgatcattttcacatcgaccgctccggaagtacccacgaatttaaggtctaaactgttatcgtctccttcaaccacctcgaacctctcgagaccggagagttcatcatccgcgattttagccaggtgggctagtgatttaaggaagggtgacatgaaaggtctcttgacgcaaacttcgacagtttcatctggcaacgagacccggatggtgcttcgatcctcaactacggggatcacgtcgaagttgacgttgaactcacgtgataacgccgagagtaggggttcgatgttcgcgtacatggtgaaggtgctccccaccctactggatgcagtcgttgaagaggtcaacgccgataaagatcattcggaaacctttcggacggagccgtggtccgggcagccggacgaggtcgtggaaacgaggtatatccagctggtacggcggctcgtaggggaagggcgaaacgtcgtgctcgtaggcgagccaggggtggggaaatccacgacggcgatagcggcctgtgagaaaccagtcccgatagtgttgactttcggtggaaacctaccggtttccatacttaaaactttcgtcaacacgctacgtgtgacgggtccgcggaggtggatctccgtcgatgccgtagtagtgggcgacgcggtgatcgagggcaaggtccgacggcttcccctgatcgatgaagtcgtggtgttctcggtgacgatagttacgtggtgtctaacgcgggctctgaagatcccgatcatcgccatgctggccaccgacaagaagtactacgccgaggcccggaaaatcttggagctcgcgggattcgaggttgtcgagatcaaacccgataagcacaccgtcgaggaagtcctgcgcgcgcatggactccaaggttccccgaggacagacaatcctcgggaagagctcaagaggttctccgagcgatcgtccaaccactctcagtccgacgaatgagtcctctggattccatcgactcgagccgacgcttgagcctactacgagcgattcggagtctacgggcgagttcctcggtactcacggaccccttctcgtagagttcgttcatgatccgctgctccagcacgcggccggtgaagggacagccgtcgtactcccgacattcgattccgagcatacacaccactttatccaagtatcttcgaatatcgtacagtggtgaccacgtcatcggggagatacagcagctctttaccagtacgtcttcagggagtttcgaccgcactgtcttgtatatgagttccaacctgtccagtggcgaaagaggcccccgggctgggtcttgagctgggttgaattggacgatcctttttcgagggttaagagcgagaatcgacaggatccgttccgcgtcggcctcaggaggaacaccgggtagtccgacgaccccgcccacgaacgtcacttcgagcccgtgttcgtgacaccatcgcacgacacgccaaaactcctcgaatccgcgacgacgccccgtgatcgcctcccattcctctggtgtgcggcccgaaaggctgagtttcagatagtccaggccggcgcgctggaggtcttctagtagatcgagtgggatgagagggcccgttccgacacccacgtcgacccctagttccagcttgatgagctccacggcctccacaaggtccgtatcgagcgtatggggtgaggctccctgaattacgacttcacgattccccgctttaacccgcttttccgcctcacggaggatctcctccggtgtcagctcgacgtgatctcgcactaggttgtagtagcagaacttgcacctcatgtcgcacctagtcgtcgccactatgcttcccgtccgcgttttggaccgacccgtgatcacgcggaggaacgcctcgacttccggaccgtccgtagacaatcgaacgggttcgttacggtattcgtagtcggtgttcggccgtaccagctccaggaacccctcctcggtgagggcgaacccgcgatgagtcggctcgataagcccctcatcacggaggtcgttaacggtcttgctgatgagaccccggttaccgctcacctcgtccatgagttcacggcgggagagcggacccttctccgcgagtgtgcggagtacgcgctcccgaaggtcaccaccatgttttcgagaacgcctcatagtcctggacccttcggactccggtgatttccccgttccgtacgaccaccgagcccggaatcgggtagcagttatagttgctggccatagattcgcagtaggcaccggcggacaggaacaccacgaggtcgccctccgaaatatcgatgggaagctcccggtcttcggcgagtacatccccactctcgcacagcgggccagccacggaggccttctcggtggccgagtaatcgccaccgtgaacgacgacctcgtggtaagcatcgtaaagagctggtcgtatcagggcgttcataccggtgtcaacgaaaacccacctccgacgtccccgtttgacctgtctgacgcttgtgaccaggatcccggcttcacccactatgctccgaccgggctcgaggtacaggtcgaaccccgacgactcggagtgaagctctttcaggtcctcctggagttcctccgccagatcgtgaggagacggtacctcctcacctcggcggtaccgaatcccgagcccaccgccgatgtttaggtacgagatttcctcgatcagtccggtgtcctcgagaaacgttcggacggatctcaacgcctctgaaaacggcctcaaatcggtgatttgggagcctatatggtagtgaagccccaggaactcgacccactccgattcgatcatccgcctgcagactcgttcggcgatttccagctcaacaccgaacttcgacccttcgaccgcggtggcgatgtgagagtgggtatcgggactcaccttcgggttgaccctgagcgccactaaggccctctcaccttcatgccgcgcgattttttcgatacgttggaactcctcgaaggagtcgacgttgatcacccacgagcgttccacggccgcgcggatctcatccgaggacttcgcgttgccgttgaccaccactgtctccgctcccgcgttgaccgcgaccttcatctcccacagcgacaccacgtctgcggctcgagtctcgtctacgatgtgttcgacgaggtatgggttgaagttcgctttcatcgcgtagcatacgtacacgcgatccgggaaccaagaaaacgcctcctgatattcgcgggcggcctttacgggcagcatccgcgtcgtagacgtacaccggtgtcctcgtaccggcctcctccaggatgtcgtcgagctctcgaccactgactttaaccaccgctacgtgttccgtttctatcattgcgggactaccccttcaagttggcgaccagtagctccaccgacttaggtccgatgccactccggtccgcccaggcggctaggaagacccctaagtcgtccggagttcggccgaaggtgtaggcggcgacacaacccaaagcttcgaggtcgcgtttaagacgttcgaagcccagcgggtcgaggaagatttcaccctgggtgaaggcgtcgacggcctccatggggttctccacgggacgcacggagacgggctcttcgtccgcgtattgggcctgaatgcgctccaccacgaacttccccagttcttctatcagctccttaccctccggagattccgggtcgaccacctcaacgtcgcatcgctcgaggacgctctccaggtacccctgcagattatcgagatcccaatcctcacccctactcataccgcggactatgaggacgtctacgtcatccaatagcggccgcgagccctcgaaagcgtccagttccatcatgatcttcttggcgagtcgatgaatgtggatcggggtgccgggcacgatcaactccccagttccttccttagctctcccatggtagtcacacgttccgcgaacgcgtcgtgtttgtggatggactccttgttcacctggcggactatcactacagcgtcgtcgggaaggtagtcgaaccgttcgacaattcgcctgatcatctcgcggacgcaatcctcgacgaatttcgggttctcacacgcagagcacgtgaccttaagctcatcgggtcttttcagtagctcgtaggtcggggcgctcatggactcctctattatttcaatgatatcgttgatgctcaccctatgcacgtcggacacttcgatgagtatagtccccactcctcgctgattatgggtcataggatgcacatcctcacgcactatcttcttggcgagatcttccgcctcttcctcttccaagtcgagttcttccattaacctgtgcttcacgcgttctttaccgtgctcgcgcatcatttcgagggcgcacggacacgctgtcagtccgactacctcggctccgaccatcttcctagtctcgatgccgttatcggtcctcttggacaccgcacgaccgatgattttgtaaggttcttgagtcgggagcttcgtcaccggagtccgccgggatagtattagttcgccggtcatgtaaacctccgatcgcgtcgcgtaatcatgacgttccaggagtcttcgggatatccgcgagcagaggtcttcaatgacggtgtcactcccctcaaccgacatctcaagctcctcgaggacttcctgtaacacctcgtgactgcgtgacatatggatccctttctggtgagcggggagatccacgaacaggttgaacgtggacacgagtacgatggagcgcttcccgcgacgcggtatttttacgagcttctttatcccgctgatcccgacccgggtgaggtgagccgggatctgagggtcggcactctgaacatcggggaagcaagaccgcaaagggtaccctcccctaaggaggtacggcgctctttatacggtagttcactattcggaccggaggaacgtatcacgtcgggggtgccaggcttgccaattaagctccgcgtagaaaaagcctatcccgaggacgtgggtaagcgcgcggtacgcatggataaagcctcgcgggatcgtattggagtctcagaaggagatctcgtcaaaatcaccgggtcgaagaccacggtagcacgcgtcctgccggcgaagaaggaggatgtcggtaaaggaatagtgaggatggacaagtacgagcggcagaatgctggggcctccgtaggcgagccagttgaggtagaccgggccgaagagaaagtcgccaagcgcgtcgaactgatgcccacggagcgtgtagtcgttccggtccaggctgggctaaaagaagaggtcgaagaggaactgacccgagaacacgagcaggacatcctggagcagatcaagcggtacctacggtcacgtgctcagcagacgccgattcccgcgacacaccgggacgtgatcccgctggaagttcaaggcaagaccatcgcgggacacgtgttgatcaagttcccggacagcctgctcgtcgtcgggatcgagcccgaagacgccaccgtgatcggtcccgaaaccgagatcgaggtcaaaccgtattcggaggacctcgcgaaagccgcggaaatcccggacgtgacgtatgacgacatcggaggactggaccgagagatcgagctcatccgggagtacgtcgagctcccgctcaagcgaccggaacttctcaaagaattagggatcaagccgccgaagggcgtgctactctacggcccgcctggtaccggcaagaccctactcgccaaggccgtagcgaacgaatgcggggcgaagttctactctatcaacgggccggagatcatgagcaaatattacggcgagagcgaagcgaggatccgtgaggtcttcgaggaggcccgtaagaacgccccggcgataatctacatcgacgagatcgacgcgatcgctcccaagcgcggggagaccggcgaggtcgaacggcgggtcgtcgcgcaactgctcaccctcatggacggactgtccgaagacgagcgtgtggtcgtactggcctcgacgaaccgccctgacgacatcgatcccgcacttcgaagaccaggacggttcgacaaagagatcgagatcggagtgccggataaggaaggcaggaaggaaatcctccaaattcacacccgcgatatgccgctggccgacgacgtcgacctggacaagctggcagaactcacccacggtttcacaggtgcggatctcgaggccctctgtaagagcgctggactgaaggctctgcgcagggcaatccgaaagatcggcgccaagttggccgaaaagggtgaaaaggaggagagagaagtcgccgtcaaggtctcggagctgtcggacgaggagctcatggaggtactggagaagggcctggatcgcgctaggattccggaagagaagaaacgcgcactccgccgcgttctaagggaggccgaggaagaggagaaggaagaggtcgcgtacaccgacgcgctggataaagtgctcgaagccgaggagctgcccgagatccgggaggagctgaaggtcactatgcgcgacttcatggaggcgctgaaggagatcgaaccatcggcgctgcgcgaagtcattgtcgaagtgccggacgtatcgtgggacgatgtgggaggactcgaggatgtcaagcaggagttgaaggaagccgtcgaatacccgcttaagtacccggaagtgtacgagaaactcggcacgagacctcctaagggcatactgctttacggcccgcctggtaccggcaagaccctactcgccaaggccgtagcgaacgagtcggatgccaacttcatcgccgtcaggggacctgaagttctcagtaaatgggtaggtgagtcgatcccgggcgacgaggtcgtctgggcgaaggtcgacggagaggctaagctgatacccatcgaggacctctacgagctgtggaaggagggccgggacgtcgaggtcgcagcactgacggaggagggtgtcgtctggtcgtcagtggatcgagtcgcccggcaccgccgtcggaccggtctcgtgaagatcatcacgcgcacgggtcgggaggtcatcgtcaccgaagaccactccgtcttcacggtccgtgacggcaagattgtagacgtgccgacctcagagctgtcggaaggagactggatagtcctgccggcgaggcttccggcgggcgactcggacgagattgacggaatcaagatcgatgaggacctggcgttcctgctgggcctgtacgtggcggagggtagcctgacgaaccagaaggacgccgtcaggatccacaataaggaccctgaagttattgaggaaatcgaccgaatcgtgcgagagaagggctgggagggccggtactatgagagtgatcacagctactggatcaagagtcggaagctcaggcaactatgtgagaagctgggcacgaaagctcgggagaaacggctcggaccgcttctgtcactgaagcccgaactgctcgccgccgcgctgcgcgggtactacaccggcgacggatcgttctcggtgaagccgcacggtcgatctgcgatcatcgaagcgaccacggtgagcaagcggctggccgacgaactcctcgtcgcgctgcagattctggacatcgtggcgcgcaggtacgagtgcgacgacacaaaggggagcaccagataccgcgtcatgatcaccaagtcagagtacatccgcacgttcgtggaaaaggtcgggttcgcgcagtccgaaaagaacgagcggatccggaagttcctggcggagaggaagtggacgaggggccgctccgacattccgacggagctcatcggaagcccctacacctacgtcgaagtcgagtacatctcggatcgcgtcgccgcggacggtggtctcatgaaggcggagctcgagcacctgtacttcgacaagatcaaggagatcgtaccgctggaccgtgacgatgagtacgtgtacgatgtcgtggaggtgaagctgggccacaacttcgtcggaggccagggagtcctgctgcacaactcggagaaaaagatcagggagatcttccagaaagcccgacagaccgccccgtgcgtgatattcttcgacgagatcgacgcgatcgctcccaaacgcggtaccgaggtcggaggttcacgcgtcaccgagcgcatcgtcaaccagctgctgacggagatggacggtatcgaggccaccgaggacgtcttcgtgatcgcggcgactaaccgtccggacattatcgacgaggcgctgttgaggcccggccgcttcgacaggatagtgtacgtaccaccgccggacgaggaggcgatgaaggagatcgtgaagatccacacccgagacatgccgctggcggaggacctaaccgtcgacgatatcgtcgagatactccgaaggagagaacgcgaagaggacgcgaagtacaccggtgccgatatcgaggccgtctgcatggaggcggcgatgttggcactccgcgaggtgctcgatgagctggagaggattgagaaggaatcggagaccgaggaagaacttgaggccagaaaggaagcattactcgaggagcttcgagtggagcgtagacacttcgagaaagccgtcgagaaagtaccgccttccgtccccaaggagaagctggaggagtacgagaaactgaaggaagagtaccagcgcctcgcggggtgacttcggtcctcgctccttctcaccgatcacatgctcctgcgcctgtgcaggtggctcaggctgttaggataccccacggtagccgcccacgaagtggtcgatcctacgaaggtcgaggatgaagacgaagtgctggtggaattctgccgggaacacgatgccctgctgatcacgagggacagacagctcgcccgaagggctcgggccgttctaatcacggccgatagcgtaccggaacagatagccgaggtgttagagttcctaggagacgaagctttcctagacccggatgaatcacgttgccccgagtgtaacgcgcgggtacgacgggtgacagctgaaaatccgggaccgttcgaagtgacgtgggaatgcccggagtgtcggcgtaagtactgggtcggcgggcattggcgagatatggaggagactatcgaccgcgtaaagaaagccctacgccgagttcaaagggggcatctacgtgggtgaaaaattaacgttggaggaaggggagttcctagttcgccttgcgcggaaagcaatcgtacattaccttgagtccggcaaaaagatcgaggaaaagcctccaactcaacgactcgcagaaaagcgcggagtcttcgtcacgcttaagaagtacccggacgacgaactgagaggctgcatcgggtttccggaacccatcaagcccctggtggaagccaccgtagaggccgcaatcagtgcggccaccggcgatccgcggttcccgcctatgcgcgacccttcggagatggaggagatcaagatagaggtcagcgtgttaacaccacctaagaaactggaggtcgataacccgaaagagtacgtcgagaaaatcgagatcggaagacacggtatcatagtgcgccgcggagcccgatcggggctcttgctgccgcaggtaccagtggaggaaggttgggacgaaatagagttcctgtctcacgcctgcctgaaggcgggtttaccaccggactggtggtgttctccggactgcgaaatctacgtgttcgaagcgcaggtgttcgaggaagaggagccggaagggccggtccgggaaagggatctagccgaggagcagtgaaccgctgatccggaaggcctcgaaggcttccgcgtacttgacacctatctccatcccacggaactccgcggtcttcatcaccatttcctcactgatcgccccgcgttcgacttgggagcggtgtaccctgacagcttccagcttcttctccagcacgtcggtgacgtcgacgtaaactacgggttgaaaccccaccgtggagggtccttcccccatcagcacggtcacttcggggaacttgctgacggccgatgttactattcgaaacgtgcggcgatggtcttggtgcgtgtcattgggggagtgtgtgaacacaacgtctggctcgaacttcgagatcagtgcccggacggcatcgatactctcgggatcgacggagatcctgccgtcttcatggttcaagaattcgactcgatcgacaccgagacatttggcaccctcgatggcctcacgctcccggacctcctcgtcgccgccgttgtttcccttgctcattattacttcgataactctgtgccccgcggaggaaagcttacgcacggtccctccacaatgaacttccatgtcgtctgggtgtgcaaataccgtcattacgatcaatcatgatcgtccccctccgaggcgcgagtggtcctgtaccaaacgttaccacggatcgcaagccagatcaggccgtacacggcggcccattcgacgaagaacgtccacatgaactgacagggcataaccgcgagagcccagagtggccctctacggttcgaacattcgagtgcagcaaggaccgagtagatcatgcgaccggcgagagagatcagtatcgtccatggatacaccaacgggagaatataagtggtgaggaacgacgccaagagcgatcccaggacgaagacggcgaaccctattccgggaaggttccgagatcgaagtgcctccgcacaggcttggtacatccccgcccaccaacgtgactgctggaagaagttctccttcaggctggccgggtcgtccatccacacctccaaatcaggtcggtatacgaacccgaccttccgccacgtgtggataagaccgagtgtgacgtcctccgcgagattttccggaagaccctcttcaaggaggaacgtcgccttgaacaaggtgccggtggtgaaaacgggggctgacccgacgacgttcccccagaatgatatcccagaactgacgacgtcgaactgaagccccaccatcaaccctgtcaggttccttccacagtagcggattctaccgaaggctagggtagcgtcctcctcgagcagctcacgaatgtagcggtcggaaccgagctcgtccccggcgtcgatgaggaatacgtagtcggcgcgggcactcacgcgcttcagggcgttgttaaccgtctcacccttgacgttgcctcccgccttcaccacttccacgatatcgtcgtcggcgaaccgccgcgagaaccgtctgtgatcgtcttccgtcccggcggcgatcaccactttctcgatttcgacgcccttctgcgataagacggaacggagaggtttctccacagcttccactgattcgtgcttagctggtatcagtacgacgatgcgttccaacgggggttccccggaggtcagtgttcgcgacacatggccaggaactcgtcgaacacccacttggtatcccaaggaccgggccctgcctccgggtggaactgcacggaaaacgccggggcgtccgtgtgaacgacgccttcgaccgtaccgtcgttgacgttaacccagcggactctcaagggcgtgtctctgagactgtccggatccagtgcgaatccatggttctgggaagtgatgtagactctatccttatcaagatccttgacgggctggttcgcgccacggtgcccgaacttcagcttgaaagtatcgcccccctcggcgagtccgaggatttggttgccaagacatatacccatcaatggaacctgacctatcagttcacggaccgtttccacggtctccctgacgcgtttggggtcgcccggtccgttggatactacgacaccgtcgggatcgatgtccattatctcctgggccgaagtgtcgtacgggactacggtaacgccggcgccgcgtttggccagctcacgcagtatgctccgcttcacaccgcaatctatgaccacgatctccggttttccgtcggagaaccggtattcctcacggaccgagacctgcggcaccagatccatctccgagatatggggaacttcccgcactcgctccagtagttcttcatcggaaggttggtcgtccggttcgtagggtaccagaacccctctcatggcaccctccgtccggattttcctcgtcagcatccgcgtgtcgacgcccgcgatccccgggacgccgtggtcctggaggaattcgtccaatgtgatttcggcgcgcggatggatgggaccatcgtggaggtaccgcacgacgaagccctccacttgcaccctgtcggactcgccgacttccggtaagatcccatagttgccttgcatcgggaacgtcatgattaggatctgtccgcggtaggacggatctgtcagagcttcctggaagccagtgtgagaagtgttaaacacgacttccccttcggcctcgcgcggactcccgaaaagttcgccatgtactatcgtcccatcctcaagcgcgagtgccgccctcaaccggacgaaccctcggagtttcctaggatcttggtgataaaagctacaccggggggcccacgttgataagggagctgagaccgctgctgcgacgggtgtcggacgccaggataacgtcactcaagagggagtgggacgagacctctaccagcgtttttgtacgcggtgcgatcgagacgctacgacatgcactcaggcggaccaccgggatcaatcccgaagcattggcgggggccgcgacggcgagaagaggcgaccacgtcggcccgcttcggaacttaactcgggtgttggagggtaaggccgaacacctcgaggtgagagcactccaactgtacaaggcagccgcgtgggacctactggaagccgaggagaaacacttgggcctcggcgtcgcactggacattaaggagggtaaagtcgtcgttcgtcggagccccgacgtccgagagtacataccgatctctcgacgttacgatctaccggacgacccgcacgagttagcgacgcttttagtggaacgttacgacttggacttcgtctacgttgcggacttggacgctattctacgcggcgagcccgcagatacctcagatgctcttgagtcattagagaagcccgtcttcgtggacgtgggggcgtgtgaacccgaccttccgagtcacgcccacagggtgatccctacggaatgctatgacgacaagagcgagtacatcgaagatctagaggaggacgagagtgctgtggcagggctggacttgaacggctctgagatcctcggcccctgggacggcgtgggcgacttcttggacaccgtggtggaagtagtgtacagacgcgatccgggcgtgctcgtgatcgacgtcggtgcagtcggttcgaaggagggaccgccgtacgaggccgcgacgtccgtcgggatgtactctacggccctgatcggagggggcgtcgggcatccggagcacgtgaagctggctttgggtactcccggcgtttcgggcgttatccttgggaccatactcttcgagggggtggatcccatgaagctggaacaggcgcgccgagagggtaagcgactgcgagtccaccacatggggttagaggaggagtacttgaacctcatcaaagaaggtaaaaagaccgtagaaggacgcgtgaaggacgacaaacgtgccagaataaagcccggagataagatactcttcaaccgtaggcttctcgtgaaggtgatagacgtgagagagtacgactcgttcgaagagatgttgagggaagaggggctcgaaaacgtccttccgaacgtggattccatcgaggagggcgtggagatataccggcgcttttactcgagtgggaaggagaaaatgttcggggtgctggcgatcgagatcgaaccgatcatggatctctgggaaggaatctgtgactgaacgtcactcgaggatggggccttcaggactggggatgaaccctatccgctccaagaacttgtcatcgtatatcagctccacttcgccgcctcgcaggtacggtcctattttagccaggacgccgggggcgtcgacgccttcatcgaacaccacttcgttctccagaagcccccatctttcgatccggatgacgcgtcgcccgaagccggcgcggttcagtatcctctgaaggcgtttccgcgtgataccggctacgatcatcctatcgtaagggtcggccgccatctcgagcaggtattcgacctgctcatcggtaagtctcgcttcgatctcaccacgttcctcgttcacctcgacgatctccacctctagaggcatgttctcgacgaagccgaaactcctaccgatgtcacgtatcgacgccttctcaccgtccaggagttgctcacggagtctgtaaagcggcacgagcgcgtccacgacttcgggacctactactccgatgtcgacgtagataccgtagccgacgcggtacaggtccacgatccgaccgtagatgacgtcgcccggagaaacgtcgaacaacgatctcacggtgtcgaactcttccacgatttcttctgcagcttcttccacctcagggcctcgaatgcgtaacactgcccaagccctgaagtttttcctgatctcctcgagctcggcgtcgaaatcagatataacgctttgaacctgggtgcggagtgactcctcggcgccgctgttccggtacaacttttccagtatagtcacatccataacgggcacacgatcaccaccgggttaattcgggaggtatagcgttcagatcgaccaactcgttatgaagctcgatcaggcgcttgacggccggagaatcctcgcctaatcgttcagagaacttgcgaacgactaccttgatcgggacgtgctccgttccgaacgtcaagttatcggcgtgcgccacgatcttctcctcgagagtctcggggatgtaatccttcggcggcaaacccagcttcttggcctcatccttgggaataccggctccgatgtgcctctcgacgatccggacgacctccttcgggtaaccgagttcactgactatgttcgcgcccacgaccgcgtgatctatgccatgagtacgggccctgccgatgtcgtgtaataacgccccggtgcgtacgaggtttagatctacgtcttcttcgcatctttcggccatctcttcagccaagcgacagacggccttgcagtgctcgataacgtgctcggggcaacctactcgctctaaatccctaatggggtccctcaaccgagccgttccctgagctcctccagccttcggatctccacttttagttcctccgctagccgttccagctcgcgccgctcctcggtgagatccacctcttccagcacttcaccgcacttagggcatcggaactcgtgttccatagcctcctcgaacgacattctagggcagtcatcgttcccacagtgaaacataggatgagacatgtcattactgagtgcacgctcgacctcttcgagctcccgtcgacgctcctcgaggcacctcctgaggacttctcgtaggttgagccgccaggagtaaacggggtaccggtactcttctcgacgctcctttctgaacgtcacaacgccacgttcatggagcttgtagagcaccttccgcacttctctcgggtcaacacccaactcctcggctatctcttcgtcgatagcctcacgcttgagtatcacatccacggttctcttagcgacttcagggtccactcctttctcactgtctaggagcgataaagttacgtctctgaggacctccagatcttcctcacccagctcggcatacacgtttgaaccccccacccccttactggatgcgcttcaagcatgtaataaatttgtgtaatcgacggaacgtgtccttacgcggatggactataacagctgaacactcaccctcagcaaccatttttgcggcctcttcgggcttttcgtcgtcgatcgtgtaattatcgatcccgataccctcgatatacttcacttccaactcgtcaaggatgcccttaatccactccggggaacgcgcccccacgagcaagtccaaacccgtctccgccgcagcctgaccgagaccatagacgaccgagggatgcaactccgggccgagatcgtccttccaacctctcctcggcacctttccgcggaagagggccgtgtggagagggccgcaggtcgtcaggtacttagcaccgtccacgatgcgcagtgcgtcgtacacggcctccttgatcttaccctccgggactccggtggcgagagaggtacggtggaggccgatgtagccagggctgaggtgaagggccagctcgtacccctccttacgtaggcgctcgacgtatcgcacgtcgggatggtacttccgtatacttccggcgatcgaccagacgatctttccgcccaattgttcgacgcgccttctcgccacttccacttcggagtcggggacctccttcttggacggatgatcgatgaacaccaggaactccggcagtcgtagcaccccctactccaagtagtgcaacggggatctccacagctcttccagctcctctcgatccagtgatacgtccacgggtcccaccgagatccgcaggacgccgtctccggtgacctcccctaccacctgagccggtacaccggcctcttcagcagcccccaacacatcgtcgggtcggtccgtagtcacgatagcccgaccgtggctctcggacaacagcaggaagtcccaccgtgacacggaattcgggacttcggacaggctcagggaggctccgacaggtcccagtagctcggctacggcagctagaagtcccccggtggacacgtcagtgactgaagaaaccatattcttcctcgcgatacggcggagcaggtcgtgcagggctcgctcctccctgtacctcacgcgtggtaccttacctcccttaataccatggtactcgatgaggtacagggacccgccgagctcctcccgggtctcccctaagactatcaccgcctcgccttcttcgggctctcgagggaagtcttctagatagtccaatccccggatcactcccacggcgcctatcacgggcgtgggattcaccgggccgtcgacctcgtgttcgttgtacaggctcacgtttccgccgactacaggaacctcgaactcgcgggctgcttttccgagcccctcgatcgaccggcgaagctggtaatagacccgcgggttttccgggcttccgaagttcaagcagtcaaccagacagagcggctccgctccgacggtggcgaggttacgtaacgcttcggcgacgcacccttccgtacccgttttcggatcgatgagcacgtgccgcggattcgaatcagtcgtcagggccagggccacgtcttccaggccttcgtgctgcaaccacatcacggcagcatcgtgacccggtttcacgacggtgcgtccttgcacctcatggtcatactgccggtaaacccactcgcgaagcgccggcgaaacgttgggggagctcaggactgagcgcactagatcctcggggtccggctccggcacgtccacgttctcggggtacgaataaggctcctcctcccactcgacctcgggagcaccgtcggccaggaactcggcgggaacccgagcgatgacgtcgtcaccgtccttaaccgtgaggtagccgtcgtcagtaaccctgccgacgaccgacgcctcgagaccgtacttacggcagatctctatcacctcgtccacatcctcaggggccacgacgagcagcattctctcctgggattccgagagcatgatctcccacggttccatcccctcctcccggagcgggaccttaaagacgtcgatctcgacgccggtccccccgtcggcggccatctcggtcgcggcgcacgtcagaccggcggcacctaggtccttgcaccctttgactaggccacgctcgacggcttcccggatggcgatgatcagttgacgctccgtgaacgggtcgccgatttggaccgccggcctgtcttcttcctccgattcctcgcccagctcttcggaagcgaaggccgcaccgccgatcccgtcacggcccgttcgagcgccgactagtaccagtacgtccccggggcggtccgcacgacctcgtacgatctcactcctgcgaactatacccacacacatcacgttgacgagggggttgcgctcgtaagaaggatcgaactccagctctccacctaccgtcgggactccgatgcggttaccgtaatccgagatcccgcggacgacaccgtcgacgaggtaggggacgcgttctccgtccagcgggccgaagcgaagcggatccaggagagctatcgggaacgctcccatggacagaacgtctcggactatcccgccgacaccggtcgccgccccgttgtacggatctacgtaggaggggtggttgtggctttctataccgactactacggcccactcgtcgtcgatggcgaccacggcggcgtcatcgccgggacccacgatgacgtgatccgcctcgctggggagctgtcgaagtaagtggcgagtgctacggtaggcgcagtgttccgaccacatgttctcgaacatggctcgctccgtggcgttggggtccctgcctagttcctcccggatgagctccagatcgcgttcgtccaacgtcaagccgagacccctcagggagtgcgtaacctcgtcaccctaggagtggtcggcagacagcgggttcgtcatcgggataaatcgacgacgtgatcccacagcggccttacgtcaataactccctcgagtgtggtgacgcacatagggcagggtgtgaggacgggttttccgagccgttcgtacgccctcaccgtggactccgaaggcttcctcacgagtgccccgccgccgcaacatcgatgcctacgtggtggtaactcaacgtcgggaaggcgctccaggacatggtcatccactccatgcctcacgaggtggcacggtgatttgtaagcggcaccttccggtatcccgtcgaactccgctatctcggcgtagtacagcggacgctcgtcgagcacttccacacagaaatcgtaacaacccgggcaaaacaccactacggtgtcgaaatcatcgaacagcgagcaccacctttgcacagtctcctcggggacttcctcgccacgcttccgagcgaagttcatacagcaaggttcatcctcgcctaaggtcgccaaccccgcgcggcgcacgatttcgatgacccgtcggagccactccggccgacttctgatagtgcatcctaagatcgctactccgtcgccctgtagaggctcggattcatcggcgagcttccgtccgtacggggtacccgtccgccggactcttcgcacggcctctggggtgggttcctccctcctcagatcggtgatcacctccgtgtaggggatgttgtgtgggcacagccgctcacaaagaccacacaccgtgcagtcggaagctacgctcaacgcctcctcgaatcgacccgaggcagcgagcacgttgaacaatcttctgggtacgtcgttcggacatctggattcgcaagccccgcaaccgtcacaccgggccaacacacgctcccattccaacaacgtttcccctaggttcaaccgtgctcgaatcctttccacacggggtagggcttgacctccttcatcccacgtttttcgaccctcttagcggtctccagtgcgagctccgcgagttcttccgggataagaccggagtcgacggcgcgctccagatcctcctcgtcgattatttcgcgctccccttcctcgggttcgacgacgtcgacctccaaatccacgtaccgcacgcagttcttgaatacctccagcggcgttcctatgttgtagtaacgacccttcagctcaccgtctttgttgaaatactgatgaaccgtgaccatggaaccgtcggggagtattgagatggcgtaatcacctttctcgatcggtttgtcgattccatcgtagaagccgggtccacgcatctcacgacggaccttgaggatcccctccacgggatcgtactctactaccttagggttcccaccgagcttcttgactccctgtcccggtttcacgtggacgatgtcgattctatcgccttcggacggtccttccgacctggtcaggcatcggatcaggcgctccgcaacgacctcctcgtcaaggtcatccaggaacggttccacggtatccacggccacgctaccggcgaggctgcgacacttgaagtagtggtgtcccaccatagtcggtaggacttcggagcgcacggagtcgagccggctcttggcgagcgaatggatctccaactccatctcacgcacatctcggatgggaccgggttcggacatctcctcggcacgcttgaacagttgcttacgttcctcgattagatcgtcgatctcctccgccagctcttccccggacttaccctcggcggcggtcctccagatcaatccccatccttccgggaccaacgcctcgccgagacgcttcagacgttcacgctcgcgttcgtcccggattttgcggctgactctgatcccctcgacgggtaccaggacggcgtactcgccggccaccgtgacctccgtcgtcagcttgagtgggccgtccgacacggacttcgcaacctgtactacgagctcctctccctcttccacgacctccgactcgtcctcgctgaggaaaccctgaagtccgttcccgagatctacgacggcaaccccggcccgatcatcgatttcacggaccacgcccttgaacacgctcccttctccgatcttgtcggccgtaactgtagcccagacctccgattggaggatgtccacgagctctcgaacatcatccgccggaccctggatctcgatgccgtgtcgattcctcgtgtcccgaacgtccacatcgggcgaaccggagtcgaattccgcatcggggaaccgccgcctaatgtcatcggagggctgggtgactatgaacccgtgatccaggcagatcttggtgagcgccgtcgagtatataccacgtatcctgaccttacagggcacccagagcacccccccgggggaagcggatgggagaccccgaggttctcctcgaggtctacgaagtgatccgtaaccgtatcgaggagcgtccggagggatcttacgtcgcggagctcactgaggacgacgacactaaaccggctatcaacaagatctgcgagaagatcatcgaggagtcgggagagctcatcctcgcggctaaggatggggaccgggaaggtgtagtttatgaatccaccgaccttatcttccacgtgttggtcttactcgcgtacttagggatagagataggggaagtgttcgatgagttcgagcggagaaggaaatgagctgccagatcccccggtgcctgaggattgcaagtacgtctactacgtggtcctgtttcagaaccccgaggacaaaaactgggatcttttcgccgtgatccgcggctacccgggcctcaaggagccgtacgcgatagccgtccacctggcgcgtgtggtcgaagacgccctgaaggaggtagacgaagggctgaatgtggagctccaaataatcccgattgggggcgaggaaggcatcccggaggagaaaaccgcgaaactgttagaagccgtcgatgggctcctggaaaccgccgcccagtgtgccagaggacccgaacgagcggatgacgaattctgaggacggtgaccgtctgggatgatcggtgcgggcgaggccgacatggagcgagtcgttatcgtcggcgcgggaccggcagggctcttcgcggcccgagaagtggcacttagagccgagcgagacgtggaggttgtggtgtacgagcaaggacctagcctggaagaccggctggaaagcggggaagtaatgcgcggcgtgggtggagccggtggactctccgacggcgtgctgaacctcaggccagacgtcgggggcgacttggtttccatcgtaggggacaagagatcggcgaacgagctcgtcgagtacgtcgacgaagtcttcctgaagcacggagcaccgaaggaactcaaggtacccgaaggcccgaaggtggaggagatcgcactccgtgcggcggcggccgacgtcgagttcgtccggatcccacagcgtcacatcggctcggacaacttgccgaaggtcatagggtccctggtccgggagctggaggagttaggggtgaagatcgtcccggaaaccagagttgagaggatcttggccgacgaatgcgtgcggggagttaagctcgaagacggacgtgaggtagaagcagactacgtcatcgcagctcctggacgtgtcggagctaactggatgatgcacgaggcgaagcggctgggactggggttaaggtacaaccccatagacgtcggtgttcgggtcgaggttccccgcatagttatggaacccgtcgtggaagtgtcgcttgatccgaagttccgcacccgagccccgacgtacgatgatccggtacggactttctgcgtatgtcacggcgggtacgtggtgaaggagaactacgagggattcgtgggtgtaaatggacactcttaccgaaggaagaagtccgaaaacacgaacttcgcgttcctcgtcagcgtggacttgaccgaacctgtagaaaataccatcgagtacggtagatcgatcggccgattggccacgaccatcggtgggaacagaccgataatccagcggctcggtgacctccgccgcggaaggcgatcgacttgggatcgcatcaacaggtcccacgttacacccactctgatggacgtcacgcctggggacatctcgatggcgctcccacaccgggtcacggtggacattatcgaaggattggaacgtctcgacgaggtgatacccggagtagcctccgactccacgctactatacgcgccggagatcaagttctactcggcccgagtggaaacgaacgaggacctggagactagggtggagaacctgttcgtagccggcgacggtgccggattatcccgagacatcgtgaacgctgccgctaccggagttatcgctgggcgtgcagttgccgagcgtatcggttaaggggagacttagatggaacctatattccaaacactcttagccctacttatagccacccaaaccggtgttgaacacgataccggatgttgcacggtactggtgcacgtacaccacggatgtgatgtagtagcgtacaggagggacgctaaatttccggccgaaatactgatcgtacgcacggaatgggccgggcggagggcgattaaggagtataaaattcaagggggatacttctgccacaccgtgatcacggaagacgggtggatagtgactataggaggacgagatattcccgaagtgaatagaaaacttgagaaacttggggccgagatagtatccaaaggtcgcatcaagaaggatgaaatagagaaggccggggaacttctcaaggaagctagatggggacacttcgtcgtaaaatccccaaacgacatcgtcggagtagcatcgtacgactatagaatctcctcgccagagagaatagacatgtttaagattaaggacggtgagtacgttaaagtgacgaacaacccaaggtactacgatcggggaagatccgaagagttcggtaaaaaccccatcgacgccgccattaaaatcgcggggaaagacccgtatggacttcaccgacgagatataatcacgtacaagttaacggtggacgaaacgtcaagcagcgtcaaagtttgggcttcctacgatggcagagcgctgctcggaggagctagcggagagccggacccgatccgattcatgggcaagacgatagcggccaacgaaattccgagggtgccccgaaggaagccgttaggagaggtgatattacgagtgtgcagagaacacgagggcaagggagagctacccaatccagccgccgtagccgcggccttgatcagcggagccgtgttcgtggcgtttctaggacagctgtcgctccagcagcgaaatctttattaaatacctggggacgacagaggctgggacgaagggcccgcagctcagtctggcagagcgcggcccttgcgaggccgtggccccgggttcaaatcccggcgggtccaccaacgccatatcgttatgatcctcaaaacatttcggacgaactctcgacatcgcacggactagggggggtagcgacaatgaatggtaagattttggtagtcacaggagtagcagtatgcttagtattagctaccggagtagtagcatttaaccccgccaacaaagtcaaggagttcgaccctaagcatgccctaaacttcgctaagaatatatgcaaactaggaccacgctatggaggcaatgaagcagagttgaaagcagccaatataatggaagcagaattgaagaaatatgggcttaatgtacacgaagagaaggtcgatttaggtggcggtaaatatacgtataacgtgataggagaaattaaaggaacggacgagtccaataagtatgtgattgttggatcccacattgactcaccaggattctgtgaaggtgctacagatgatgcagcagcaatgggaattcaagtcgaaatggcacgagtgcttgctaagaatttccgtccgaagaaaaccgtattaataattggattcggtggtgaagagctatggttcaagggatcggaagcttttgtaaggaaacatccaaagatcattaagaattgtgaagcagtgatcgaccttaactgtgtaggtgctggacagaatgtgttcctaactcagaagagtgcgaaaccgaagccggtagaaggggatccaaagctcatcaaactcctggaagagtgcgcgaaggaactcggacatccagtcacggtaggcgacacgacgtacccgagcgacacctacccgttctatcataacgagatcaagcgcgtccccgtgtgtcaggtaatgagtcagccgtttgaagtaccaccgtggagtgagtccaacacagcggacaagttagacccaaaggacatggagaaggtgggagaaaccgtcaccctcgccgtggtgaaattgacgaacgccgaacccgcttcgaagccactatgggaagcgaagcgcgccgaggagtccgcaggtggaggctggcctgcgccgatgtggtgggcgcccgcgcttctgggagtcgcggccgcactgctccggtcgcgggggagatgaaattgcgcgcactactgatcgtcgatatgatccgcgacttcgtagaggagggagccccgctggaggtcccgaaggcacgtcgactcgtaccccgtatcgcccgtctcgcggatgagttcagggagcgaggtgatctggtcgttcacgtgtgggacgagcactatccggacgatccggagttcaaggtgtggggcgaacacgccgttgcggggacggagggtgcggaaccggtagaagaactgaaaccggaggacggcgacttagtggtgcggaagcggaagtatagcgggttctacggcacgtctttggactacgacctgcgctcccggaacgtgaaagaaatctacctcacgggagtgtgcacagatatctgtgtactcttcacatgcgcggacgcgctcatgcgagggtaccgagtgtacgtagtgagggactgcgtggcgtcgcttgaggaggaatcccaccggttcgctttgaagcacatggaaaagctcggggcggaggtagtcgattcggaggagatactgggggactgaccgccgtgaagaggatactggcgttggtggacggtgagcactacatccccgtaactcgggaggcgttagagactgtggaggaattggacctcggagagctcgtaggagccgtgttcatcggagggactgagaagatcagcgagcccgaggccgtcaagcgggagctgggtgtacgggtctggctatcggagtcggaagacgagataccggtggacatgatcgtcaaggtgatcgaggaagaggacgtcgacgtggtgctggacctgagcgacgagcccgtggttagccccgacaacaggttcgagatagcctcagcggtactctccgcgggagcggagtactggtgcccggacctccgactgaagccggtggagttccacgacgtcctcgagaaaccatcgcttcggatcatagggaccgggaagagggtgggcaagaccgccgtctccgcctacacctgtcgtgtgctcaacgcacggggctacaacccgtgcgtagtggtgatgggtcgtggaggtccgagggagcccgaaatagtacgtggggacgagatcgagctgactcccgagtacctactgaaagaggccgagaagggtaagcacgcggcgagcgatcactgggaggacgcgctcctcagcaggatcccgactgtcggatgtcggcggtgcgcgggtggactggcgggacgtaccttcaccacgaacatcgtgcgcggtgccaagatagctaacgagttgccggccgacttcgtcgtggtcgaaggtagtggcgcggccgtaccaccgatcaagacggacgcgggtatcgtgatcgtcggagccaaccagccgttagagcacatcggcgggtacttaggaccttataggatccggatgtgcgacctggcgatcatcacgatgtgcgaggaaccgatggcggacgacgcgaaaatcaggaaagtcgagcgcaccgtccgggaagccggcgacggcatcgaggtagtactctcggtgttccgacctaaacccaccgaggacgtggagggtaagcgggcgatgttcgtgacgacggcacccgaggaggtcgtctcgaggctcgtcgagcacctggaagaggaatacgggtgtgagatcgtcgggacgtcgccgcacctcagcaaccgtccgaagctccgcaaagacctggagaagtacatcgacgatgcggacatactgctcacggagctgaaggcggccgccgtcgacgtggccactcgggaggccctgaaggccggactgggcgtggtgtacgtggacaacgtccccatcgccgtcggaggtgattacgaccacgtgggtgacgccgtggagaacgtagccgagctggcgatcgatcggttcgagggttaatcactgtcgatcccgaacaccacctcggcgaaagcgcgctcgacatctacccgctctacgaaccggctgccccgtgacgccgcgatctctccggcccgtttgccgatttcctccgccagccgttggacgtgatccctgagggtttcggaggctttccgacttacacgtacatcctctccgaccgccctcaaagcccggtcgaacggggccaccggcaacttcttccgcacgccgcttccaccctacggcgctaggcgctcgggagcgtaattataggtcccggggagtcgggattgacgaaggttctggtggagccggatccggaggaggtgaagcagctttcggaagccttgggacggcagccggtgatactagcggggatatgtgaggccgagtaccgcggccgtgccgagtcggtggccggccccgcacttcgaatcgccatgtgcaagccggacggcacgttcatcctccacaacgcgatggagaagcgggaaccgaccaactggaaccccgcaccgtccaggcagtcgatcgaggtccgcgacgggtgtgtcgtgctgagatctcggagactggacgttcccgaggaagtagtggtgtatttccacaaggtgctcctggcctgctcgttaccgaaggaaggcgctaaaagcgaggattccgtgttctccctgttcaggtctgaggaagacatgaaacgtgtgatccgagaggaccccagcgtcatcgagccgggattccgtcccgtgggtgaagaggtggagtgcggagccggcgtggcggacgtggtcggctacgacgaggaaggcaggttcgtcgtactggagctgaagcggactcgagccggtgtcagcgcggcatctcagctgcgcaggtacgtggaggccttccgcgaagagcgaggtgaggaagtgcgcgggatactggtcgctccgtccgtgaccgacaggtgccgacgtctcctggagaagtacgggctggagtggaagaagctagaacccgtaccgctgagggacgatggtggtaagaagcagtgcacgctcacggagttcctggcgggggagggagactgaccgtggtcagggtgaagatttgcggcataaccaggcccgaggacgccgcgaccgccgacgaggcgggaaccgacgccgtcggttgcgtggtagaagttcccgtctccacaccgcgaaaggtgtccgcggagcacgcgaacgaggtattctccgtagtttcaccgttcgtgtcgagggtcgccgtgctgatggacaacctagagcctatcgaccggctggaagaagccaccgccgtgcagcttcacgggacggaggatccggaaacctgtgaagagctcagcgagctcgggttagacgtcatcaagacgttctgggtggatcagcgagggtccgtatggttgggagaggaactgataggggacgaggtgctggcggagtactgtgagatcgtggatgccgtgctcctggacaccaaatccgcggaagggggagggtccggcgagcgccacgactgggacgcgtcggcgcgattggtcaggcgactggacgtacccgtgatcttagcgggcggtctgaacccggagaacgttcgagaggccgttgagaaggtccgtccgtacgccgtcgacacatcttcgggcgtagagaaggagccgggaatcaaggatccggaagctatagcggagttcgtaagggctaccaagtcggtttaatcgggacactggcgcgtctcatccacacgagccagcataccagcgttcctaccacggcggccataaccaggtacctgagaatcggtggcacgggtgaacccgcggaaccaccctgtcgtttcaacaccttggccgataccgcggacccggtactaccgacggacacgctgcgtgcgggtgagccaccacttagagatatcccggggacgggttccactcgcctcggacggttagaaggggaacccctgacacccgtcgtggtcgccgtggtacccgccgccgaagatgtgaacttcggcgtggagccacgagctcgggccgcggagaccgccgggctccgtcccacgctggagtttgagacggtggagattaccggggacactcctgcggagaacgggttaggtacgaggagctccgctgcgggggccaactcctccacgatcccgcggagcaccgggttaaggactatggccagacaaccgcacgggccgtacttgctcacgatccgccggaaggtctccagcgaggcccgccgggccgtctcccgaaaccttcgcgcccacttctcggcttcctcgagctttccgagctggcatagcacctggtaatggtacgaccgcctcaatagctggagaccgaaatccgagtccaggagcacgaacacccggcccgctatcgactcgaccacgtagggattcagcttctccaagtgctccacgacctctcggtcgaaaacaagccgctgaacgagctcgaagaacagctgtcccagtaccccggcgatggccctctcggccatggtcgtcggcttcactatcgtggggcccagtagtatcatccacgccatcagccgtgaaacccgctccaggaagtcgttagcctctcccggggtacggagcgacagtaaccagtccttgttcatccacagtgagtgccactctcgggagagctccccggccagctgacggatgcacagcgaggacacctcgtcgagcactaacgggtcgggtaagcctgccctgatcagcctcgcgacggctaggagtccaccgtagaactcgatcgcatcctcggccagaacaccccaaagtctgtcggttacgggcttcaggacggcgtcgacgatgaggaggtctatgcggagaagtccgggagcggattccgaaccttccggggtcaggacgttctcgagcttagccgagagggaacgggccaagatctcccattcctcgggtttcaggcgctccgtggcggccttgacgcccagcgtgtagtccgcaggacagtagacgccgagcgccgccctgatcgcggccttctcgatcggtgttccgttcacttggacatcgtagaggaacttcaccgcccatgcggcgtaccagatagagtcgggtcggaacgtcgggcgcacgtcgacgtcacctagagaagccgagaacttccgaagcaccacgaggcccttctccaagagtcctggatccaaccgtattgacgcaagcgattcacggagctccggatcctcgcactcatcggagagagtcttcagcaggttggcgacggcgaagaggtccttcggggccctgaggaccgcctcgacgtgtgccttgaggagcgcccgtccagccggcgtttgggcgaatatcgcctcgagtccctggcacaccaagacgggagagtagacaggggatccagatagcacgtagcgctcaccaacgcggtcgacgccggacgacctgagcaggaccgcgagggacagtccgcgatcgttgaggacgtcagcagcggataggacgaagagagtgcgctgcttcaaggtgatcccgtcggagagcatccacgccgtctccgacggtatcagctcggggttcagcaggcagagcatcctacccgtaggcagcacggaagtatccacggtcggatcgcccggcggacccacgggcaccgactgcccgtccaggacgcgcaagaggttctcgatttcgagcttggcggaggtgacgacgaggtccctgatacgttccatctcgcggtacagttccggatagcggaaacggagctctgaagggtggtcgatcagcgactgccactccttccataccagatcgaagagctccagcgccttatccccgtacttctcgatgttctcgggcgagagtatcgactcgaggtccccaccataggttttggacacgagctctaggtacttgcggaacagcagcgcggaaacgtactctcggatttcctccgaggtcaccaggccgtagacgtgcaggtggcgggtaagctggaccggcgtcggcgattcaccgtgggcctgcatcatatgcaagtacgagtggagctcggaaacgagacggttgaagtccgtccgagccatccgttccacgtcctcccacgtgaggcccatccactcgtaaacccgggtgcgcttgaggagctccataattacgggtttcagcttctcctctacctcgggattgccctcgaagacgtggaagcacgagtgcagcagtttcacgagcgtgttaaggtagaagtcgtaggccgtggagggcgcggatgggagatagctcaggaccacggcggacgtcctccacttaacgttgtaaagctcgccgctcgtcgggcaccataggtacacgtggggaacgtcacctaggagcaccgtcgggaaatcgaggtgagacaagaacgtgcggcgcaacggcagccactccagcgtgccgtgagcccccacgtgtacgatgacgtccacgtgatgcttcagccagaggtagacggcgaggtagtaatggggcggcggtagaagcaatgagtggtaagcggccattccccagagcagaccacgtggaggttgcggtaagagtacgatgtttccgaacttcagtcccggcacgacgaacttgttatcgaccaccattacgtcgcccggtgggggaccccatccgaagataccggtgtggtaccgctgttcgagcttgcgacccaaatcgacggcgcgtcggaacgcgcgctccagctcgtcgtgtcccgcctttccggcggcataacggagtagtgcgtcggcgagttccctcagggccttcatggcgtcggttgtgtcgggcactccgaggttgctcaggagcgtttcaatgtcgcgtaacatggcgctcaggttgcgggacaacgtttcgagtgcctcgccttctaagggtcggtgcaggggctcggcgtacccgtacaggagacccggaatgccgtactccacgtagagacgaactggctcgggtagctggtcgtaccacttcaggtattccgagacggggatggtcgcgagatacgcgtgacgatcgtacatggcgcggagatagtcgccgtgccaccaacccacgttcacaccgtacagttcgatcatccgagccagctcctgggaaagatttcgtactagcgcggcggcctcgtcccaacgcctttcccgctcgagttggactatcttcaggagctgatcgtcccaaggcgtgctcacgttgtaaccggcggccttcaggttcgccaggatgttgacgagggacccgaagacgtccaatcccgaggcccggatcgattccctacccgggggccagtcgtagtacactagcgcgatcaccttcctatcgttcggtttctcggacagttcttcccatcgctcgactagtttctgcacgatctcggagttctgtcggtacggttccccgcccaagtgggtgggtggcgtcactatctcgccgcgggagtccggcatgatcacctcgcggaacagcgctccggtcggataccccaagaagtcggcccaatagacatcaggcttgacacccgcatcgggtgtgtggaactggagctgcgacgatgccgttaccggcatcgagagtgataggattaggagtaccgtcgccaccgtgatgcggggcgaggttctcgagcccccactaccgcactcacgttccgcggttgagaacccgactttaagactctagcgtggtgtgctccgccacgtctgcccatctagccgaattctgtaagagtttcgggaaggattccggcagttttaaggagaaaaggtaataatattaccgccttaggtagcacggggggtgacactgtagtgtctaggttgtactctatagtcgccgtcgccacaatggtgttgctaactggcgctgctgcggaccttcaggagtacaaggaggcgtattccgccgccgctaagatagaggaatatggggagaaggtcaaggagtccctgaacatcatcggcggcttccagccaccgtgcggtctcaaggtgatacctacggcatacccgtacatggcgttcaaggacgataaggacgccatcagtaaggtgttccagggcacagacgtagccgaatccgggtcgtggaccgaggtcggcccgggagacttcagggcgctgatctacggcatccacgagctgggtgagaactggttcgagcgtgtgaaggtagtcgccgatctggcgcagaagccggcggattacgcgctgaaggttcacgaggaaacccatgcctgggagggagcggtcgagaaagtcggagagacttgggaagactgggagaaccacaagggtgacgagaacctgaagacagcaattgcgtcgcgcgtgctggcggtcctaggtctggtcgtgtcggagaactggcgagccatcttcaacgaggtgaacaaggcggctcagatcgccgaaaacgtgggtagggtgacgataccggcgggcgtctacggtaacgacagtccgatcgagctggacttcagcaagtgtgagagtccggaggacgtggttaacgtgatcaaggcggcgttcggtgacctgacgccggatcgcgtgatcgagctgatcgactcggaggctaagtacttcgggctcggtgacaagttcgtggagaactacatggaaggaggccagtaccagccgcacgaaggcggcttcacggtggacgagatgaaggacgtgattgagaagttcaagagcggcaaggacatatacggacaggagctgtccgaggaggccctggcgttcgcgatcctgttcaacatcgaggacgtctgggcgacctacgaggagtacgtgcaccagtacggacacttcttcccaccggccgagagcgacctcaagctagcgtgcgacaagatcgaggagaacgcgaagatcgtcgaggacgtactgaacaagcttaacgcgtgggcggacgtggggattactaaggcagagttcgaatcgaacccgctggagtgtgcaccggcggtcaaggactgggccgtgggcgagctgttcggcgtcgtggagaagcttgaaaagaggaagatcccgctgagcccggtggttgtattggccgggctgctggcggcgctggcggtcctccggcgccgttaaccccgatggtctctcctttttctattcagccacgtcctcctacacctatcatgctcatcagggggtgtggtaatacgagcttaactcatgacaaagtactgacgttcgtcgtcgccaccctttgcttgttgggcgccgctaaggcggacctcgtgagcgacgtccaacagcgttgcgagcaggccgtggattggcttctaaccaaccaacaaccggacggcggctggttgtacgaaggttacggtgacaagtcctccgccatggacaccggagtagtcctactcgggctgtgcgaggcgtacgatagactcccccaggatcagcagtgtaaggtgcgcgaagccgtggatcgcggtgtcgagtacatcctgaagtgctgggacggtgacaggaagatgttctgggattacccggacggaggaggaaaagaggagtacatgccgatgtacaccgttcacgcgctgatgggtctcatcgccgtcgagaagaagttccctgacatcgccgagaagcacggtgtaagtaagtacatcgatgaagccctggagaaacttctgagtatgcaaaacgatgacggatcgtggagcaacttcggtccgggttcgtggtcgagcccgggacggtgtactggactcgtcgtatggctggcggagtggtccggtaggtacggacccagtgacgagcgcatcgcgaagggtctgaagtacatcgaaaaccacttggagaagtcgccgctgggcgggctgatctccagtaacggaccgaaaatagacttcacggtctgggatatgctggcgttctacttctctggtgacgagtattaccggagtttcgtaccgaagctgcaggagggagtgctagggttccagcataaggacgatgagttcgcgggcgcgttcgcagctcacacgtcggtgtacgacagtgaatacggtccggaaggaaccgcagctccgtgtccacacaagacggcgcgagtgttgttcgcgttgatgctgacgggagccgacccgaacgacgaccgagtgaagaaggccgtggagttcctgctgaacacgaagagccagtcggaaggcgcgtggttctggccgacgatgaacgacccatcgaaaccagacaataatccgatgaaggcgtactgtacgggctggtgcctagccgcactgggtgcgtggctgcagaaggtgcctgccaagaagcacgggataccagtatcgccgctgatggtagcgctggcgttcattccagctcgtcgagcttggcaggcaggtactccttgacgacgtagtccagggaatacttcgcgaacgcctgctgctctgccttcttcccgagtttttccaataaatccagttctttcttccagaacgggtcgtagtaccgcggatctcggcgcagctcctctattctcttgtaatcggtcttcttcaggggttccgtgggaaggtcgtactcgacgatatcggtggccgtgacgccgatgaatttagcgtcaggacacgcgagctcctcgttgagatgagcggctttggcacttccactccttatcaccatgtaaatgtgccagccgtagggatcgccgtccgtgaacacgtacacgggcaatcccagctcctcgttcagacgtcggagcagtcgtctggtcgcccgagcggcttgacccttcagtcccacgatcagcgcgttcagcttctcgtgggcgcgctcctgaacgagcctacggtacatacccatagtctcaacggcgatcacgcgttcggcgccacaatccagtatctcaacggcatcgacgttgggcgggatgttgtagccgctgatcccggctcgctcggcgtggatctcgacgccgtcttcccggactagcaggtcgccgtacacggcggcgccgtcctcttcgggccatacaccgaactcctcacgcttgagacctagcgtcgcttccaagtcctccacgatcgcgtcgctctcgcgctgatccttgaagtcgacttcccaaccttcgctggtgtagtaaatctccctgagggtggcggagcggcccttctccacgagctccttggcgaaggcggcgacacttagcatctgagccaacttcttggagcctttcagggtgcgtggacggcgctcgagcttatcgggaccgagcgtgaatatctcacgctcggggtcgtaacggatgttggacgtcgtacgtttcggtatccggactggttcgtccttctccacgcacttcaggacctgtttcgcgaactcacgtaggcgttgtagggcttcggacatcctgtagttccctcgggtgctctgagaggcgaggtgttagaggatgtcggggggctccgagtccttccacaggcgcagcttctcgcgcttcatcttacgacgctggtcctcgaggaaccggtacacgcgtccgtgcggggcacccgaggcgagcatttcgatcgccttcctcgcgatctgaagctgtctgggcgttccgataagggccaccgtcttgccacggatggacacgtcggcaccgctgagctcctcgataagctgccgcgtgcgcccctctcgaccgatgatcctggccctctgccgctccaacgccttcgggttgcggccgacgagctcgtacagatcgatcacttcgagactcgcgtcttcctccctcaggagtcggaacgcacgctccggggagaaccctcgacctatggccaacacacattctttggctttgatgagatcgagcggatccttgacacgctcggtgggacggatctcgacctcgcccgtcttgctatctatgcgcagttccactcccgtcttttcttcgatgtaacgcttggtctcgccatccttgcctatcaacactccgatacgatctttggggattttcacgcgctcggcgctctcgtagaattcatcggccagctccgccaagtgctcacccccggacgtactcgagggcctcctctaacgtgggggtgtcgacacttaagcgctcgaagaatcggatgaggtttcgcaagtcacgtatcaacagctcttcggcgatggggtgatccagcacgaccccttgggagaagtctatgatcctgtagtcgcccttgcccccgtagaggatgttgtactcgctgaggtcgccgtggactatctcggctttgcgatacatcctgcggtagtcatcgaggatattcgagagaacgtcctccgcgtactcttcctccgggggattatctttcatcagcgggtacgggttcccttcatcgtctccgatgaactccataatcagcacgttgttcatgtgagcgatcggctcgggacacctgacgcctgcctcgtaggcgcgggtcaggttcttgaactccttctcggtccaggcgtagacgatacggtgtcgcttgcgcccgatgttcttgaacctgggatcgcctcggatgtacctccacatccggcggaagtcgctggtggcggcgcggtaaatcttgacggcgactagctcgtcgccacggactcccctggcgacgttggcctctttccctgtcttcacgaaccccatgagcccgtcgatgtatccacgcctggacagctcgtacagggtcatcagggtgtactggtcgaagacttcctcctctaccttcagatcttccagggttttctccagtcttttgacctttcctggtttcggctccagttcctcgatcgcggagaagtatttatcttcagacaaagtcaggcgcccggtatgatctcctcaaggagcttggtcacacgttcgtccaatttacccttgcgcttcagccagtcgacctgtaccctagtatacctccacgtaacgtcggcgcgttcaggttggaattcccagggtttcacgaggacaacgtctccttccctgatccagacacgcttacgcatctttccgggtatcctcgctactctagtctttccgtcgacacacctcacctgcacgcggtcgttacccaacattttctccacaactccgaatatttcgccttcctttggaagtctgatcttcttcagggtctcgtcgtcgatgcgcttacccatcggcgtcacccccgtcttttgccggtctcacgagcttaagtacttcctcggaaacgcggacacacgccagtagcgcgtcgataccggacagcgccttcacgggactccgcgcctcgaacgtcactttgacgcggtcccctcgcataccgatctcgtggcggaaacctttgggtccaccctcccacagaactccggaggctacttcagcgggcagtttgaggacgagctcgcctctgagtcgcgagtcgccatcaaccccttcatgatggtgcgctcacggctttccttacgggtttcaggatctcggagaggtaccccgcggcgttctctttcaggtcgagcggatggagctcgccgtcgacgaagtcccgctccagctcttcgtaactggtgtaggtgacatcgccaccgtatttctccggacgttcgatcgtgacctcatcgtactcccggaatatgaagtaccgatagatctcgaggatcgggttaccttcggcttcgcgggccggacagtacgcctttcgaagcttttcccggatgacctccggctcgtcgtcgacggcgatgaagttgttcttgctggaagacatcttctcgtctccgtcgagcccgtggatgatcggggtgtgtaagcacgtcggcgagtcgtaacctagcttggggagcacgtcccgggccaacatgtggattttgcgctgttcgagcccaccgaccgctagatcgacgtttaggtgcacgatgtccagtgcctgcataagagggtagacaacctgggataccggagggttttcctcgctcctagcgatcatatccatgctgcgtcgggctcggcgcatggtagtatgacgagccatccggtacacgtccagcgcgtagtcttcgtccagctgaaactccgacccgaggacgaactcggtcttgttcgggtctaaacccatcgccaggaagcatcggcggttgtaatccgccagctcacgtacttcctctaacgtacctttctcgttgagatacgcgtggagatccgcgaggagtatgatcacgtggaagccggcctcttggaggtcgatcatcttgtcgatgaccaacttgtggccgaggtgaactttacccgaaggctcgaacccgacgtacgctacgggttcttctttttcctcgagaagttgtcggagctcctcctcggttacgacctcgacggcgtttcgggttacgagtttcaacctctcctcgacgtccacggacgagaccccctggcggcgtcctgcgtccgttaaaggtattcctcaggaaccactacggcgacacctttcagcagaatcacgtacacgcgctgtccgacgtgaaggtcgacatcgctttcataacactcaaccgtttcacccgtacgctccaacacgacccggggcggggtgtcttcgatcaccacggcgggttcgggcttcagaacctcgacgcccttcagctcctcccacttacgtttgaccacctccctgctgatgagatgacgcagagaacacctctcacccagacctgtgactagataaggttggccatccaccagtaggatgtcgcccttgcggaaatgaggtatcctcacggagatggcggccttgtacttgcgcttactgcgctcgcggtcgaatccgacgagcttgtgcgactcccctacggtcccgccgtacgcatcgacgaggcggcgggcgagcttgcgtgcggcgttgagtgaaccgatgtagaagtcgatgccctcctcagggtactccacgtccgagatgtaagccatgggatcacgctcgagcagtgaggcggccgcctccgtcacgaagttctcaacttcctcccgctcacgctcggtcagcttacctcggagcgaccgcacttggagtatagcctcgtagtatcccgaccggaatttcatgcatcgatcacacagggcgaatactaccgggaccttgaggtgatacttccgagtgagaacttcccctcctacctcccattcaccctcagcgagcagctcgacgaggacgcgagctccgggaccacccggttcacccttaacctccagaggttttattcggacatatacatcgggaagcgttcggaggttctcctccaactcccggaggacgtactctacgagcagttcttcgatactcccgacaccttcaggcggatcttcccagcgcagcccggtgtgacgtgctaaacactgcgcacagactcggacctccagtccttcgggtacctcgatcatcgggtgctcttcaaggtaacattccgggcacaggccgtctatcgtcgtatcgacctcacgtccgcaccgatgacatatcagctacccttcacccccgttcgagacgtacgggcggttgtcgggaatgcccacggtgttaccgacccctacgatgatcacggtactgtcttcaggggcttccttagcgagttcgagggcacgttcggcggcttcttccacggcgtcaacgacggacttgggcatgggcatgacggcctccgtagcactcatcttgatggctaccgcatcgagatcgatgccttcgtcggccgcgatctgctcgatcttgtaactctcatggccgggatcacccatggccactcccacgccctcgctgactttgcctgtcttctctccctcgagtttgagggcggcgtcgatagttataattttggaaacatcaccgtattcccttacgagcttctttacggcacgccccagtctgcccaagttacccccaggcccatgcgccttgactatcagcagtctgcgaccctctagctccttctcggcggccacagtacctttctccacctcccggacgggtgagtctccgatgagccgagccgcgaccatagggccaacgctgtcgccgataggcacacacttgaggaacgctttcgcaccctcgtagttactcttcacgaactgtttaaatgtcggcaatagcatggttattagaagcaagagctgtatattgttggttttcttagcagataacagcaggtgtcggagatattgggcaataacatggatggagaacacgcacgtaagtgccatactcatgttgtctacttcgacgccatcgcgttttcctgtgagtactcttgcgtacgagcggaacttatcctcactccgctcaatcaagttttcaagacgttcaataataccgtgaggatctagttgcacaggctgaaccacgaataggtttgcagcccgttgtacgagtgtttcagcctcttccctatcgcatctggcccgtctcactaccatctgctggactttttcgtctattttccgtatacgctcgacttctccctctatcctcctgaaaagcaccacctgatagtagacccgaatgaagagccagaagaggataatggagacaataaaatacaccaggttctcgacgagtgatgtgtccacgttcaacgccagcaccccatggaaggtcgctggactccgtcacccttatacgtgatggaagctgtgtcgccggttggcggggggacccgagttggcgctaaagaacccggcggttcacttactctcggcgttgtgcctatggggggtcgccgggctcatactagctggtgcgcagtcagtactaatctcgttcgcctccgtattgtcctccgatcccggtatggttttaaacgctttcgtccttctcttagcgctcgttagcgccaattctcccgcaactttcgcagagatttacatgggagaacctcaaccgtatgcgatagcatcgatactgtttggattcgctcctataataccatatctaataatttcgccctttcgatgtaatgtgcttgtgttaacggcgtggtggaagcccataattatagccttactggcgatatggtgtattgagttcgcaatatattatcgcagggtgaaagtcttcgggtacagatacgtgaacgttcacagattcgtattccgctagttccgtctcttaacccctagaacacgtcgtttagctttctcgaatatccacagtagtgctttgatttccttatctgtgcatcttgctctggcgagaaacctccggaaggtcgtgcacacgttctcgcgacgggtactgtcgaagttcaaagccttcatgaggtcgtccaaggacttcactagcacctccttctctcgcttagtggcagcacgaccgtaccgttccggcacgtactccatcttcttaagctcgtaaagtactacagccacggaatgcgagaggttcatggaacggtactcctcgcttgtcgggatatgaagggtggcgtcgcaaagctcgacctcccaagtcctcagacctctatcttcgggcccgaataccacggcgatcttctcgtagtccgaaaacgcctctctgacctcccagggcatcatcgggttcctagcgggcgttgaggcgaggacggcggtcgtcgctatggccgcctccacgtcctcgatagcctcctccaacgtgttcactatcaccgcgttctccaacaggtcgagcgcgtgcatcgcccgagctatcgccacttcaccgagctctgacctaggtcttactaaaaagagctcctttaccccgaagtttttcatgacacgggctacgtgaccgatgttcccgtcgtacttcggttctaccagtaccacccgcacgtccaagctggattcctccggggtgcagtctttgctcgagggtatggtcgtgaacgagtttcgggagcgaaggactaactactgggacggggaggtcgagatcgaaacggaggacggaaaactcaagcttcggatgcccggaactatagcaggttggctcacgaagggtaccagggtcagggtgcacggcgccgacggggtgcagtccgtcgacgtatttaaagatgatgtggaggtggagcggaggtacgaggacgagtgggtgccggtgtggccaccgttcgagatggagaccgaagtagagaagcgggatacgctcggtcgtggtgtttacgagtacagattgcgggccagggaggccatctaccgggaagacttcgaagctatcgtgggcctcgaacagtaccattacgcctccgataaagacgtggtggcagtgtggggatgtaatgagtgtggacgctcgatacgggccaacctcaagccggaagagtgccccggatgcggctcgtcgcggatcgaacttcgaacgatcagaggctcgttacccgcttccaggttcatggtagtggagctgctgaacggcgaggagtacgagccggatgtcctggcatacgtccgtgtggatccgcccatccctaaactcaaccgacgtctcgacggtaaagtggagcgaaacatcagggagaaagtcttcggcaaggactggttccaccctaccttcgagcccaagcgaggtaagaccattgaggacatcctaagtgcctgcgacaccaaagcggctcgcatagctcgggtcgtggttcatccagagtaccgggccgacggtattgggagagcctcggtgcaagccgctgtacgatgggtgaaagagcgtcgaatcccggaaatgaagtcggaaaaacacctgatcgaagttatcgcccaaatggccaggtaccatccgatcttcgagagcgtcgggttcgtatacctatgggataccggctccggccgaccttacctcgtacgtccgctgtcggaagatgccaagaggaaggtttcgaggttcatcaaaaccgacaagatagcgagacagcacggcggccgactgtacagatccaggttgcgaaaactcgaggtagagcccctcgacggaccgatcaaggtgaagcgactccacaagatgttctccacggagctcgacgtgaaagggttgcccaaggacgtcgttaagcttctcgaggcgttcggggtccttcatcggaagattcagcagtacgcgcttcaggacgtgaacctacggatcgagcccggcgaactcgtcgtggtggtcggccccagcggagccggaaagacgacgttagtccgcatgattatgggcgcacacgaagaattcatcgagaatgtccgccggcgcatcatccgcgagctttcgacgccggtagtgtcccgagcactgtcttccatgggtacgaaccctaaagaggtcgcggataagctggtcaaggagatgtaccagcccgacaaggggaaagtttccctacctgagaacaccgaactgtccgcgatgatcccgggggaagtggaacccgagatcgaccccggtgtgaccatcatcgaagacctgtggtcggtgaccggggacgtgaacgtcgcggtggagatactcaaccggtccggtatctcggatgccgtgctgtaccggagcccgtacgagcggttgtctccgggtcagaaggagcgagttcgcctggccaggatgatcgcggagggggctaacctgatagtagtcgacgagttttgctcgcacctggatccgaagaccgccatgcgcgtggcccgaagcttttcggaaatgtgcagggagttagagatcaccgcgctgattatcacgcacagagccgaggtcatcgatgcgctagcgccggataaactggtgtacgtcgggtatgggttggttggggtggaggagaagagttagccttcttcaccctctccctcaccttcaggcggtatcgccagtaccgggcagggtgaccttgatagtacacccttggtcgtactgcccaggatgagacccttgactccggagaggccccgtgtacccatcacgatcagatcaacgtctcgctccttagcctcttcaacgatcccttgaaccacagagggtgactccactacgagagtttcaacatcaatgccttcctccttggccatctcggcgatctcgttgacgatcttctcggcctcctttacgatctcctcgggcagcgtgaacgagggtttcgtacccaatggactccatagcggaatcacgtgaatcacaatcagtgtcgcatcttctttcttggcgatttcgatggccgctttggcggcctgcttagcgttttccgacccgtcggtcggtaccataattctctcaaacactggaagacacccccactatcgtagcttcaccacgtataataccgtaacgcttcgtctcggggggtagaccttgcaccccatggcccgtagacactttgagaaactggacgagaagcgcgtacgcgagcccgtcggtcccaataaagactgtgagtactacccgtgccactttgatggtcaagactgtacatggtgtttttgtcctctatacccgtgtctggacgaagagcttggggagtggattaagaccaagaacggctccgaagtttggagttgtaaggattgccaccttattcacagaccggaacccgctaaggtgctacttcgagaactgttaagtgtgggaaatgggagcgtgttacgaggtgcagaacgactagaagaagatccagaactcaaggagaaggtgcttgaaagtgtcaaaagagccgatcggaaacaccgacagcactcctcacgacgttgaggacctcctggtcaacccggaatagcgggttaggatggaagtccatgttcaaacgctctttgatgagccgccttaagtcctccaggggaagagggttgggatacctaacgggaccgtccagtgtaatcaggtacgcgtgatcacggccctcaaggtacctcctcagctcgtcctcggacgctttggctaactccgcgatctcggcgagatcttcctcggactgtatcgccaccttcttgatttcctctatggtgacctcgccgagcacggcgcacagtggactggacgcgtacacgatgcaggtacgttctcggaggatcgttcccgggagccaccttctaacttcgacgttcttgacgccgtctaggatcaaattcgcgaatttcggctttaccgacatccacacgggcaaaccgagaacccgtaacggtaggatgcattcctggtttttgtaatcttgagaagggttattgtaggaaagatatggtatgagggcgaccggactgatagtggagagaactagtgggatgcggagggaggtcactccttgaagtgcggaattacctcctgacctacgagctcgatagccttctccttgtccggaccgatcggcgagccgacgacgacctgagtgacgccggccttcagtagctcttcgatcttgtcgactacggtgtccgggtctccggcgatggagaacgcctcgatcatgtcctcgtccacgaggccgatcgcggtgccgaagtcgcccttaccgatcgcctcagcgatctgctcggccttctccgtgtcgatgccgtgacgctccagcaccacgtccggagaacccatcacgatgaacgcgaccacgatcttcgtggcctcgatggccttgtcctcatccttgtcgatcgagaagcacgtgtacgccgcgacgtcgatctcgtcgaggcttcgaccggcctccttcgcaccctcctcgatcttcggaacggctacctcgaagtccttcgggttcgaagcgttgacgaggactccgtccgcaatctcaccggcagtcttcagcatgatcggaccctgagctcccatgtagaacggaatgtctgaaccttggatagagcgtgcattcacgtcggctgttcccgtcttgacgtacttgccttcgtactctaccgggccgccttccaggtactggtagatcacctccttgacctcgcggatagcggtcgcgggaccgacctcgtcctcggcctcagggttccagatcgggatcttacacgggaacggcagtcccatcttgtcgaacgtggccttgtctccgggacccattccgatgatcgcacgaccgccggagatccagtccagcgtggcaatgttactcgcggtgatcagtggatgccgggtgtacgggttagtgatacccgggccgagcttgatcttgctggtgatcacggcggctagagtcaggactcccatgtaggagtaattgttgtagtgatcacagatccacgcgtactcgaacccgttgtcttcggcgaccttgatcaggtgggcgatcttcgtgggcttgtcgtccggtaagagctcaataccaaaggacacctctgccattgtttgaacccctatcgagcacttgatctcacttttaaatactgaaggtctcggtgcggggcgaactgaagttagtaggttcgttcaccgacgagagttgaggtaggactctacagtggtcgcaagcgtgaccggtggagttattacaacggcggaagacgcgcgtttccggcgggggtgccctctattggtgcgcagcgtgtcggtaggcgaggtagccagacgtgacgtgatcacgggcagtcccacggaaaccgcagtggagatcgcctacaagatgcgggaacatggcatcggcagcgtggtcatagtgaacgagaaagacgagcccattggcatcatcacggagcgcgatctcgtgatcaaggtggtatcacagggtaagaaccccgacgaggtgatagcgcgggatatcatgtctcaaccggtgattaccgtcgaggaggacatggaggtcaacgaagccgtgaaactgatggtagacaaggggattcgaaggcttccgatcgtagacgataatggtaaactgataggtatcgtaacgatgcaggacattctccaggttgagccctacttagtagctaccatagaggaggagatgaagaaattccaggaagagctcgaggaactagaggaagtgtcagagattattgaaggagtttgcgacctctgtgagacctactcggaagagctccgattcgtcgacggagtgtgggtttgtcctgagtgttacgaggacattttaggcagggagatcgaagacagggaactcgaggagtgatcacccgtgctgacacgtcgttccggtttgccagacacctccgtcatgaggttagccaccacgaacgtcgtatcgatgccacctaccgccacagtgaaaagcgccgtcgacacgatgatacggtacgggttccgcaggattccagtgacggaaccgggtgagctggaacttgtcggtattatgacgggcaaggacgtgttagactacttggtcggagagcgtcggaagataatagagcgccgatatgggagtacgttccttccggcactccatgagcccgtgagatcactaatgagaactgaagtctacgttatcaccccatacgataccgtccgtaaagccgttcggacgatgtttgagttcgaagtcggggctttacctatagtgaaagacaagaagctcgtagggataatcactgaacgcgatattatggccgatctttacgacgtactggaggacacgagagttgaggagataatgactgaggaccccgaaacagtcccatcggacattacggtactcgaagccgcggaaataatggtagacagagagtttcggagactcccagtggttgaaaacgggaggttatgcggcctcgtaaccgctaccgatgtgctccatcacgtctccagtatggcgactgaaacatcgccggatgcgtctgttgaagaagttatggatgtgccggtggaagaaattatgacagaagatgtcattacaatcgagcctgacgttaatattgaagaagccgcattaacgatgaagggggctaacgtcggaagtttagtagtgacggagggtaacgatgtgataggaatcataaccgaacgagatattatgtacgccattgccgagagaatgtgaggtacagtgaaacacagaggctgaaagctgaaagcgcaatccaaagtgggtgagggttccaaacgaatttgacggtggtgggacttgggacgcgaagcaagatcatgttgtcaatgccgcccaacctcacacctcgatccgggatccagcaggggaagtaaggtaccttcacccatacccatccacgcccatagactttgaaccaagcgtggcccaagtccacacgtatcggttttaagttcctcttaggtagcatcttcacaatacgaagcggtctatcatgaactatattgatcccgaatatcttggttttgaacttatgatatctatccagcactaggatttccttaactccaaattccttaagtactcttacttcttcgggtgatggatgcctatccatcaccacaacttgtggatgagcataacgtactaagtcacaatcaggaattcgtgtgaaggcgtacgctggtgcgtatttaggatcatatcgcaacagtttacaaagtctcatatacctgtatttgttacctaaaaatactgatttaatatcatctatttcataccccatcgttggattaaactcgtaaactttcacccatcgataatcacgaatgggtcgtacaccaacgcgttccagttccgtgatcatacgcttagcatacggtttccgtgaacttagtatcaaaaaccgaacccctaatacatcccctattttcaatgctttattgggttctacacgcttgaatgaacgctgatactgtacaacaacatcccgaattggagtaccctcacggtaccacccgaagactgatggagcaccagtaatgtaaggttccattccccaaagtgctcgataccctaccgttgctaccctatcccacggtccagtatgctccctcatccacagtaaagccgatagttcagagactgtgtaatgaactggacgataagcatattttaaaccgattgctgcatcgactaccatcattgagcatatcattatcagcacggtgtgtcgccttaggaaccggaaattatcaacgacgaatgccacaaatgtgcagagaatcactgccgaaaacatcaaaaaccatttcggttcgaaaccaatccgctccatgggtttctgaagcacgagcccgaaggacaggagcagtgccacaccggtcatgatcgcgaagggaaggaaagttctaggacggcgtcgtgccgcgagaattaaccccgcccaacccaggaggaactggatcgcacccacgtatttggcgtaccttgttttccaatagtccggtacgaagaactcccacggatcgtgtaccgaagacatgctgatccaccatttcggcttggtggtataggagtacgtccggtactcaagggcgggcatcaaccaccacgaaaccgcgagtaccgagagcaaaatcgcgaagagtacccacgcgtgtcccggtacctccgggagtatcgaaggaagctcctctttccccaccgcccacaacgtccaggatcgggagatgcggagcgctacgtaggctaggcacaccgttatagcggccagacccgaactgtggtgcatgaggatagtcagggagagcacgagcgccaaataaccggcccagcgaccgcgctcccagactctccgatatacggccacaagcagcccgggaaccagggcgtagaagacgatggcggcaacggtcgggattcgaccctcagtgaatgtaatttcaatatgattgtaggacgtctgatacgcgacggcggcgattagggaccctaacggtgaggctcccatcagacgggcggatgcgtacaccgacggccccgcaagcgagtaagccagccaagtccaccatttccacgccgttaggacgtccgtcttcgcgaggtgtgtcatcagggcagggatgaagtacgccaggggtggataaaaccacagaaaggggtacccgcagtaccagtattccgaccatttcgggtacggcacgtcgcccatcgaccagagcttttcgagcatccaaaccttagtcatgtgcccgcgcgcgtctgcaccactgggaaaccagttccaaccgtagtcaagggaaggagaagacaccaccgcacccactaggaaagcgaccagtgcacacagtacgtctttacgatccaacgtcctcttccttccccctcgtccgcggggtgagagcgtggctgatccctctaaagacgttaagaagctgtcgatgatactcgaatcggaggaatggcgcgtagaaaaagccatagagcgtggcacgatccggcgtgtgaggacgtctttcccgggcttcgtctactacagaaccgtacgggaattcgccgggttcgagcgaggaaccttgatcgtcccgagccacgggttgttgctgcgcgggtttcccaagattgagcgcgcgttgttgcttgagccggctctcaggtcgaggttcggtgaggtggggaaagtgatcgtagaggagaagatgaacggtcacaacgtacgcgtgttcgagctggacggagaggtgtacgcggccacgcgcgggggtttgatctgcccgtacactactcacaagctccggaacatgtttgaggatgagttgaagcagttcttcgaggactaccccggaacggtagtctgtggtgagttcgtggggaaggagaatccgtacgtgtcccgcgagtacccggaagcccgtgacgtggggttcttcgtgttcgacgtccgggacccgagcggacggttctggtcgtacgaggagaaactgaaggtggacgagtacgggctcgaacgcgttcggtgcttcggtgagttcgaggtgagcgaagtcgaggagatccaccgtatcgtccgcgagctcgatcgtgaaggtcgggaaggtatcgtcatcaaggatccggatcgaaagctgcctccattgaagtacacgacacactcggcgcacgttgaggagatcgagtgggcgttcaggttcgcgttcgacttaggtcgtgacttcgtgctgactcgcacgatccgcgaaggattccaatcgtttgaatggtgtgaaaaagatagagagctgaagcgtcggggcgcggagatagggcgagcgatagtagagggattgaggagggctgtggagcaggtggtggaagaaggcgaggcctacgaagagatcccactgaccttcgaatcacgggagtggttcgaacggtacgaagacttcgtgaaacgggtcaccggaggcactcattcgctgaagatcatcgaagagaaggaggacggaaccgtccgtgcggtgctgcggaagcgttacttcgggaccggtgataaggtgtcacgaatcctcgaggagggggtcctgtaggggtttgatagaagtagagattccaggtcgaggcgaactgcggctagagcacctagttctcgattacaacggcacgatagcctcgggaggaaagttgctcgaaagcgttgtcgaaccactgcaagagcttaccgaaatcgtgcacgttgtcgtcgcatcagcggatacttacggtacggttgaagacgagctgaacgatgccgggctggacatcgaggtctacagggtgagcgccgggaacgagcgggaggataaagctgaactgatcgaggaactggggccggaagtctgcgccgccgtggggaacggcgcgaacgacgagttgatgcttagaagggctgcgttaggcatctgcgtgataggcccggagggagcgtgttcgaggaccttgctgaatgcacacgtggtcgtgcgggagccacgtgaagccttggagctactcctcgatccgaaagcgctcagggcgacgatgaggtgttagcgttgcgggtgctgctcaagggcaagatcctgatcggagggcgggtacgagagcgcgaggtgctggccgaagacggttggatagtcaagatcggcaagagactgaacgaagaggccgacctcacgctggaattgggaaaaagggagctagcggtcccggccccgatcgacctgcacgtgcattgccgggatccgcacccggattacccgtttgggttcaaaaccgaaacaagaaggtttcttttaggaggagtcgctaccgtagtggacatgccgaacacgcgtccggctcccactacacctgaaacgtactacgaaaaggaggaactggcgcgggagaacgccgagatcgaggtcatcgtggccggaggcgtgagggattctcagtgcaccaaggaactcgtcgaagccggagcgtacgtgctcggggaagtgttcctagcgacgtccaccgacgcgcccgcggtgccgtggagcacgcttccggaaatcttcagggaactatcccctgatggtcctctaacgatattccatcccgagctcgacgaactggtggccgagaggccggcccgaaacctctacgagcacctaaaaaataggccgccggaggctgaaacaaccgccgtagggctcctggccgggctcaaggtaagatacccaagccgtatccatttgtctcacgtcacgctgcccgagtcggtgaagatcgccaaaggagcggacattaccgtggacgtgactccccaccacctcttcttcgacgtgctgcgagtggacccggaggaccctgtgtttaaagtgaaccctccactgcgaggtcgtcatcacagactcggactcctgcgcgctgtgaggagaggggacgtggacgtactcgcctccgatcatgccccgcacatcctcgaggacgagttcgaggacgtcccatcaggagtcactggaggggagatcatcctaccggcggccctcacgttacacaggcgattcggtttgtcactgagggacgctgtggccatgatcacgtgccgaccggcgaagctcctaggccgcgacgatctaggtgaggtagcggtggggaaacgtgccagaataacggtcgttcgaatgcgggagttcgtcgtccgggccgaggagttcggagaggaagatcggaaattcccctacgacggtatgcggatgttcggagagcccgtcaagttgatcgacgggaccaaggtgtacgacctcaaggaatctcggcgggaggggaagccggtcatactggagggtgagtgagttgcccacgggtgccagggtactcgtcgagtgcttgaaagaagagggcgtcgagcacattttcgggtacccgggaggtgccgtcctaccgatttatgacgagatctacgacgaggtttcgatcgaacacatcctcgtacgacacgagcagggagctgcccacgccgccgacgggtacgcgagggtgaaagggaaacccggagtctgcatggcgacatcgggacccggagcgacgaacctagtcacgggtatcgccacggcttacatggactcgtccccggtaatagccatcaccggacaggtccccaccaccatgatcgggaaggacgcgttccaggaggtcgacgccgtcggcgtgttcatgcccatcactaagcataactaccagatagggaaacccgaggagataccggaagtcgtgaaggaggcgttcaagatagctatcaccggtcggccggggcctgttcacatcgacgtgcccaaagacgtgcaggaagcggaagtggatgtcgagatacccaaaaccgtcgaggtcgagggcttgaacgtggtcaagcgcggtcatccggtacagatcaaacgggccgcggagttactcgccgaggcggagcgacccgtcatcttagcaggcggtgggtgtgtaatctccaacgctactcgggagctgatcgagctcgcggaactgctcggtgctccggtagctacgaccctcatggggaagggagcgtttcccgaggatcatccactagcactgggtatggccggtatgcacggcactaaggccgcgaactacgcgctgacggagtgcgacgtgctactcgctgtagggtgcaggttctcggacaggactacgggggatccctccggattcgctcccgaagcgaagatcatccatattgacatagaccccgccgagatcggcaagaacatcccagtcgacgtgcccatagttggtgatgcgaagctcgtcctcagggacctgattaaggagttgaagcggcgtaagtacctgagggaacgtaagcgctggggagagaggatcgaggaactgaaggctgaagtagagatgcctccggaatccacggagtccgaccaacggatcagcccgcgtgagctcgtacgtgtgttacacgaagccctgaaagatcgggattacattctcactacggacgtaggtcagaaccagatgtggatggcccgatacttcccggtggaagaaccgcgcaggttcatctcctccggtggtttaggaaccatgggattcggtcttccggccgcgctcggcgctaaggtagccgcaccggagaaaaccgtggtcgccgtggtaggagacggtgggttcttgatgaccgcgcaagagttagccaccgccgtggacaacgacatcgaggtgaaggtcttcgtcatggataatagactcttagggatggtagcgcagtggcagaggctgttctacgacgaaagattgtcggaatcgaaactcgatgagaaaaccgacatagtgaaactgacggagtcgtacggagcagccggaattaccgtggaggagccgagcgagctggagtccgcggtagaggaagccttcgagactccgggtacggtggtggtggatgtgttcgtagatccggaagaaatcatcccgatggtgccgccgggaggcgagttgcgcgacatccttggtgaaaaatgaggcggaagtgaaaaaaggatggagggggcctacccctcggccccgacctctaccacacgcggcaccaacatcgctgtgcacatttcaggcatttcgagagtggcctggtcgtcctcccagcgttccaactccactcgatcacttccggatagagcgtggaggacgcgtccgaagttcatcggggcctcccctactcgttttacccccaaatgtacgaggtcgttaaaatagaaggcgtgtcatgacaagggtatggagttcctaaagcgcgatccgtgttcacgaaatgggcacaacattgttcgatccacttcgaaaaagttaaaaggtacgtagcgaacggtgatcaagggcgctcgaacatggacttcgaggagtacctcgagaagtggttcaagggcgagaccaccgaggtaggcatctacatggcgatggccatcgtcgctagagagcagggctaccccgaagtatgtgacctgctggagcaaatcgctatggacgaagcccgacacgcggccgccgcggcgctgatcgcggggaaggtcgagaacagtctggagggcctgatcgagaagatggaagaaatgattgaaggtgagaaaaacgcctacgaaaccaggatggacgaagccgaccaccactccgacgagctggacgacgagatcatcaccctgctgaaggctaccgcatacgacgaaaagcaccacaggaagatgctcaaagcggccctcgaaaagctgaaggagtaacttccaagcgcccccttcgacgccctcgctcaatcgtcatgacatccgaaacgatggggtgggcctttgaggtacgtcgacgcacatgtgcacctcgacgttaggagttacgaagacctcgagagaatggccttatctggagtccgaaccgtcgtcacgtgcgctcacgatccttaccccgacatgacggccgaggtgtactccgccctcttcagaaggctcctcggggtggaaacgtggaggggcgaaaaggccgggctcacggttaaggtggccgtgggagtacatcccggaggcgtaccggataacatgagcgacgtgctacgggaagtcgaggaactcctgagtcatgaggacgtcgtcgcgatcggagagaccggcctcaacgaaaatccggatgatagagaaatccaagtcctggaggctcagctgaagttagcccgagagcacgaggtacccatcattgtccacacgccgagcaggaacaaggtcgagatcaccgagaaggtgttggagatcctgaactcttcgggtatagacccctctctggtgctggtggaccacgcctcggcggagaccgtctcgctcatcggtgaggaagggtacgcggtcgggctgacactccgaccgggagagctcgatgtgtgggaagcgtgtgatatcgtggaggagtacgccgacgaaatgacgctcatcgcgagcagcgacctgggatctctagccgccgatccactcgccctccccaagctggccctcgaactggaacgccggaacgtcgagaagagcatcatccgggacgtcgtagcccggaacgctgagaggttttacgggctctaacttccgccctaaagcacgatgttcgaggcagcctcggtccccgtcctctattcgtggatcatgtaggcgggtgatcaggccggtcagagcgaccccatcttgaagacgagtcctacagcgattcccaaggatcgcttcctcatcgcgagatcactcgagacctgaggacaaaccctcattctccccgcccttgagaaccaacgtttacccaaggggctgtgaggatcgattgcgcttcgccgcactctactcccaccagttcggtaagaggatggtagccaacctactgaacgaacccggtcactgcagggcttgcgggcctgtatgcgacgggtgcaagtacgacatgtattcgctcgtcgactccctcgtcgccgttgaggagctacccaaacccgaagagttacctccgttcgtcgacgagcccgaggatcacctccccgaactaccgcccgtcgatgtgctggtggcgatcggattgcatcccgacctcctagtagcgctgtccgaagtatacgagattaaggcactgatagtgcccgtcgaggaacccgactggatcgacccgtggatcgaagagaaactacgagaggtatgcgaagagaacagcgtagagctcactgtggcgaggccaggatgcgacctggaaccgtcgggtcccgtaaccgaagcgttctgcgacgcgggcatgatcgggaggcctaagctgttcatgaaggtcgaggacggcgtcgtgatcgacgtccatgtagtacgatcggcgccgtgcggttgcacgtggttcgtggctaaacgactggtcggtgtggacgctgatcccgaagaggtgaaggctacagtttccgaggcacatcactcgtacccctgcacggcttcgatggaggtcgacaagcacgtgggggataccctgctccacgtagcgggccggttgcacatcgaggcggccctccgagcgctcgaggaagcgacggataccgacgcctgacgggtatctcacgccccgcccagtactcgctccaaaacttcccggaacagtctccacttatccccgtgcagactgtactccctgcgcacgtcgtcctcgatgtcctcagccctgtaaccgacgggatagtacgtcgagacgagctccccgtttcggcgctccggtctcagctcgatttcaccccgacggagcaggtcgaagatcgcttccttcacgtcgacggagaagtagggtgccttgagcaacatgcagtgaccgtattccgttcccgtcaatggtcttccggtctcacgttcgaaagctttgtcgagcaaatacaccgcacggaacaaggagcgcttatctacgcccggtcggaacgcgacgatgtacttcatcagcggccgcaagttagcgcccgtcggtttgaccgtgtgacacctgcaccgggcgtgcaacctgggtcccccttgtatcagtatgttcgaaagtgtccaaacgtttgatgaaaatcgaaactaatataagtcaagtcacccctccaatggtcggatagtatcgaacgttcccatagtaccgaacaaggggatccccgtggaggaaaagagatcctcgtgcccgtacgccgatgaagccgtgtgtgagctagtcgagcacgcgaaggagctgaatgaggagattccggagatagagaccccgcacatccgatggcccgttcagttcccgaagtgcccgtacggcaagcaaggcgtctggtgtaacatctgctcgaacggcccgtgccgaattacggagaagacaccacgcggtgtctgcggagcgacggcggacgtgatcgtggcacgcaacttcttgcgtcacgtcgccgccggagccgcgtgctacgtgcactgcctggagaacgccgcccgggccctcaagtccgtggcggacgaggaatctccttacgagatcgcagacgagaaggcgctgaggcacgctgccgaagtatacggtctagatacctccggtaaaccggaagatgtggccgaggagatcgcagagttcattctcgaggatatctacaggcccagatatgaggagtccgaggtgttcaaggctgttgtacccgattggcgcatcgagatgtacgaggaaatgggcctaattccgggcggagctaagtcggagatacacgacgcccttgtcaagacgagtacgaacctcaactcagaccccgttgacatgctcctccacgtgctgcgactgggactgatcaccggccctgtcgcgctcttcggtgtggagacgatcaacgatatcctcttcggcagcccgaagatcacgcaaacggagggtggtcccggaatactggacccggactacgtcaacatcatgacgaccggccaccagatggctctcatgaagtacctgacggacgccgccgagaagctggaagaagaggccaaggcggcgggagctaaaggtatccggatcatcggtgcgacgtgcgtcggcgacgatttcgaggcgcgcgccgagcacctaccagacacgtacgcgggcttcgcgggtaacaatttcgcgacggaggcgctcgcagcaacgggtctcgtggacgcgatcgtgagcgagttcaactgcacgttcccgggtctgaagttctacaaggagaagctggacgtcgagctggtcgccgtcgacgacgtggccaaggtgtggggcgcggagctgatcctctgggacccggagcgtgccgaggaggtcgcggaggaggccgtccagagggccattgaggcgttcaaggagcgccggtcgaagcacgaggacaagatcatggagccgaagcacaggcacgagaacgtggtggggttcggatacttctcgatcgaggaggccgtcggctgggagaacgtgctcaagctgatcgaagaaggcaccatccgcggcgtgtgcgccatcatgggctgcacgaatctctccagcggcggccacaacgtgccggcggtcgagctcgccaaggagatgatcaagcgcgacgtgctcgtgctcggcgccggctgtgtgaacggggcgttcgccaacgctggactgttcaaccctgaagcagccgagctggccggtgacaacctccgacaggtgtgcgaggagttaggtattccaccggtgctgcattacggcccatgtctggcgatcggtaagatcgagcatctcgtcttcgagatcgccgagatacttcgagagaaaaccggcgaggaaatcgacatcccggacgtacccgccgtcgcgagcgcgccgcagtggctcgaggagcaagccctagcggacgcgtcctcggccttagctctaggtatcacgctgcacgtgagtcccgtaccgccggtgaccggtagcgagctggttacgaagacgctgctggaggacctaccggatctcaccggcggcgagctgatcgtggagacggacatgaagcgtgccggagagattctcgccgagaagatcgaggagaagcggaaacggcttggtatctaattctcacccccacttccgggatggtggtgaccatggagatcgaggcgatccgtgtagcaacgggagctcctggcgaactgtatatggtagccgagatcgcggaggacaaggtcgtgaacgccgaagtgtgctcgggcacgacaccgatctcctgggagacgctcgtcctcgagaagcccgtggagttcgccgtagtggccgccgaacgagtatgcgccagctgtgacgcgagcctagggctcgccgtggtcgaggcggccgaggcagctctcaacgtcgagatcccggacgaggcggagcgagcgcgcgagatcctgaacatggctaacgtcgtcagggcgcacgccaccgtgctggcgaggactgacttcctcgacgtgaagaagcccgcgtacgacctagtgagagctgcgaaggacatcatgcacgccgtcggagggaagcccgaccacccaccggccgtgaccgtaggcggtttggacctcgaaaagctgcccgtagacagggttgaatccgtagctaaggacgccgccgaggtggcagacaggcttgaggacgaggtcggatccgcggtagatcggatgaaggaagatatcgacgtggaaccggaggagatgccggcgggactgaaggtttcggacacgtacaagggcgacatagacccagacaaggtcgagacgctaatgccggatgaattctaccgtatgaagaccaccctggagatagcgaacaacgtcgtcgccaggtatgacggggagcccgtcctcgtcggtccttacgcccgagtaaggagcgcggaaaacccgctggacctctacaccgccagggccgaggaagtagcgaggatgctcgacggtatcgcaaacgccgtatccaggctagatccgaccgggaacttccgaacggacgtcgagctcggctcgggcgagggtacggcggctgtggaggcaccggagggtaccctgatcgtctcgctgagactacgggccgggcgcgtggacaaggccctgatgttaactccatgcaacttcaaggttgcggcgatcggggagatggtgcgcgacctgacggttgacagggctgagacagttctacgcgcgatcggcctctccggtagatgtcttacccactagggggaagcccaagatgaaggtggctgtgctgtcccttatggcttgtggtacatgcgccaggaacctggaggaggtttgccacgaagagggtcatgaggtggtctggtcgaacctagaaggcgacgagggagaaccggacgccgacattctgttcgtagaaggcgcggtggacttcgccgacgccgagaccctggaaaagttagaggaggccgcttcggccgtcagtaccgtggtatcactgggttcctgtgccgctaccgggggtttcgagcgacacgtcataggcatgcgcgaccccgaccggtaccacttcacggtcttcccagctgccaagttcgtcgaaacggactatgcgatcaacggctgtccacctactacggacgtgatcgcgtccttcctcagagctctagaggaggagaacgaggacgaactccgaccgtacgaagtcttgtccggggatttccacgggctcacgccggaactgtccgctccggtgaccggtccgacggtaccggtcgaggacgtactcctgacgtcgaacaaggacctgtgcctgggctgcgacctggacgtgattgagaaggacctcttctgcgtcggctgcggaacgtgtgccgcctcctgcccggcgtgggctatcgagatggacgagaagcccgtaatccggcaagagaggtgcgttcgatgcggaacttgcttcgtaagctgcccgagatcgttcaggatatgaacccaacgggaggtgatccgtgttgcgcaagctgatccgaagaatagcagggggcaaagaggaagagaatacccgtgagggatctcccgagaacgatctcccggaccccgaggtcgtgggtgagtaccgcgaggtttacctgacccgcgcaaccgacgaacgtatccgcgagcacggacaggacggaggtactactacggcgctactcgcccacgcactggaggaggacacggtggaagccgtgattgcctcgtcgacagtcgagacatggaagcccgaacccgtaatagtcaccgatcccgacgaactgatcgagaccgcgggatcgaagtacgcgatttctccgaacgtgagtgccctcaacgaggccatagcctcctacgactcagtcgccctcgtgggcacgccgtgtcagatcaccgccgtaaagaagtctaaaatgtacccttacggcctggctaacgtgacggagcgtgtgaagctaaccgtcggcatcttctgcaccgagaacttccagtacgagagcctactgaagctgctcgaagacatgggtgtcgacgtcgagaacgtcgagcgtatggacatcagccacggtgaattcatcgtacgcactaagaacggtgatgtgcactcggtatcggtttccaagctaggcgattacgccaacgaggcgtgtaactactgcacggacttcacggccgaggacgccgacatcagcgtgggatccgtcggcgcgccggatggctggaacgtggttctggtccggacgaaagaaggcgagaaggtgttccggtccgccgtagacgctgacgtcctggaagtcaaagatatcggggaaggggacccgaacctgctcgagcgcctggccagggacaagaaggaacgcattcacacctccatgtgtgccacttggagaccttatcaccctaccgttcctctctaacgtcatttcactatttctccgagttcaaggggcccagagctgtgatcaagccacgagatttcctgaggtatttcctctactcttacatcgtaacttccgcacagctgctgggagataaggcccctactctacggcggatggtatgcaaaaacgtggtaaaggcgttgctacgcgagcatccggagctgaaagatgccgaaccggtggagcttgtcaaagatgtggcggagagcttcctaggggccgacgtcaggatagaagagaagtcaacggaaaccgtcgtacacgtgagagggtgcaagatctgcccacgcgatctgatcgaagagtttacaggtgagaaccccgacctggagggtcccgtcttcagctacaacgtgtgcgcgtttgtgaccatggttgaggagattctgcacgctctgggccacatagattccgacatcaagcatgacccaatcaaacgcgggcgctgccgcgtaatcgtcaggcctaagggcacggactgaaacggggtcttcaattgaccgtcccgacgttccttcgcaaggtgaccctgcgtgagatctgtgtcattgaggagtacgtggacgtccaatacagggctatcgaagcgttgatggacacactaccttcgaccgacctcgtccggctgaccgtagccaatgctctcgtcagctatcagctctcgagctctggagaggattggtggcgtgagttctccagctacttccgtgaacgtcgtccgagggacatcgttcgagagtacgcccggttccttccccgctctaggggcaatcggaggctcatccgtcagaagctccgccgcctccatcgtgctaaggcctttctagaggagttatcctggcaggacgcgaaatcgtactaccgtgacatgaaccggttacgccttgaccttgctcgggtcctcaacgccgatcccgagtctaagacgatcgtgttcacggtcaagatgttcgggtacgcactaagggcgataacgggtaggtttcgtccttatccgttcgagattccgattcctgtggacgcgaggatcgaacgaatcacccgaaggatcacgaacgatgatccacaactgtactgggactcgatcgcacggcggacaggcatcccaccactacaccttgactcgatcctatgggtcgggacgagtcgggatccagaggtaaagagactgctggcaaaagtcttaccgaagcttataggggaactggagatgttgggcaattgaacctggatcctgtgcgcggtatcgatcggcggacggttgtgcaggatttaacatttaaccataagtgatccgagaggacggaacgactcgcgacgtattggaggcgattttttgttaacctaacgatgacgagctcggggttcggttcgggcagacaaagtacggtcggtggggggtccgagctggtacggcccggcagtcagaaccttcgaggggacccgagctatgaaactggtgatcgacgtaccgaaggagatcgctaaggccttggacagcaaaacacgacgtgaaatcctgaaactgctggaagaacgcggctcgatgacgatatcggacatcgccagggagctgaacctgtccaaatcaactgtccatcaccatttacaggaactccgaaaggccggtctcgtggacgtcatcaaagaggatcgcgaaactcccctcccgaagcgctactacgggctcgtgagaagactcgtccgagtatcgaagccgaagcttgaagatgcctccgagtatgtcataaaagccctagaacgtggggaggacctgagaacatcgatgttcctagcgatcgcggcagcgtatcgcgcggtgttggagtccctgggtatcgacgcctcggaggtcctgtacgagctcggaaaggagatcggtaagcgactcgcggaactaggatccgaagagaccgtgctgcggaagggcttggagatcatagccgagtcagtagaattccgtcaggagaacgaccgtgtggtggtcgagattgaaggatgccacgagtgttccgacctaccctacggtcccgcatgtcatttggaggcgggaatcatagccggtgttctgtcgaacctgagggaacgaccttacgaagtccgggaggtggagtgctgcggggaaggcgctgatagatgcgtgttcgtggcggaaccagctactgacgaagaacgccccaagtcctagtgactttagacactccttctacccaggcgaccaaggctaacgtggcggctatctcttcgtcggtcacttcggcgacgttcttcgccgtctcggctatgaggcctactctacgctcgtctccggcagccgccgccaaagcgagggcgatgagatgcttcgtcttgtcgtccaacggagactccttccatattattctatgcagctcctcaacgacctccgcgtactcatctcccaacatctcttcggcatacttcacagctatcagacctttttcgtcctcctccttggccggttcaccgggcttccgggacaacggcagcccttcatactagttggacagggcttaaacgaggagcgtattcgatcagagtcggaaatctttaattccttcagatgtctaggacccgcgcattcgaatcctgtaatgccctcggatctggacgccaggacaactcgaggtgaggtgttgggcacttccggcagtgagtgaacacttcttcccccacgtgggtccgatgatgctatcagattgttcccgaggtccgaccggggccggctaagtgaggttactgttcattcacgcggacgagatgtcgttcgaggcgaggcagaagaccaagatcgccgaggaagagccgcctattaaggaagcggaagttgaggactgtctggtagtcttcgcggcggtccaagaagctgatgaagagaatccaaaggccatcgccgaggcggccgtagaggagatcgaagacgttgcgggtgaattgaaggccgacaggatagtcttgtacccgtacgctcatctagccgacgatctcgcttccccggacgtggccgtcgaggttctgaagagaatggaagggctcctgaaggagcgcgggtacgaggtcgtgagagcccccttcgggtggtacaaggcattccgattggcgtgcaaggggcatccactctcggagctctccaggacggtaacccccgaggccgccgaggaagctgaggaggagaagatcgagtccgagttcttggtgtacatggacggggaattgataccggtagaagaagtggatctctcggaacttcccgaggacttcaggcacctagtgatgcacgagttgggtgaagagcgtgaaacgggcgacgaagagcccgcacacgtgaagctgatgcgggagaaggaaatctgcgaccacgagccggcagcggacgttggacacgtacggtggtacccgaagggtcacgtggtcaggagatgcctggcggagtacgtggagaacctcatggccgatctaggagcggcggtcgtcgagacacccgtgatgtacgatctgagtgaggacgctatccgggagcacgccgacaagttcggggagcgacagtatcggataagggctggaaaccgggcactgatgctgaggtacgcggcctgcttcggagccttcaggctactagcggacaccacgctcagccggcgtcacctacccttgaagatctacgaactatcacaaagcttcaggttagagcagagtggtgaggtggtcggactgaagcggttacgggcgttcactatgcccgatctccacaccgtttgcgccgacatggacgaggccgtggaagagttcctcgagcaagcgaaactatgcttggaggtagggctggacctcgggttggaatatgaggtagtgttcaggaccacggagaagttcctgaaggagaggaaagaagtcctagaggaactggccgaggccatggaaaaagcgtacggtgacgcgaagcccgtactggtggaggtactgccggaacgtaaacactactgggaatgtaaggtggacttcgcgttcattgatagcctcggaagacccatcgagaacccgacggtacagatcgacgtcgagagtgggaggcgcttcggaatcacgtacgcggacgagtcgggcgatgaacgtcatccagtgatattacactgctcaccgacagggagccttgaacgtgtaatatgcgcgatcctcgagggccagtacaagcggttcgagcaggagggtaagctgccaactctaccgacgtggctgtcgccggtacaggcgcgtgtgattccggtttcagagaaagtgctggaagaagctgagaaagtcttcgaagagctgaaaagtgaggggttccgagtcgacctggacgaccgcgatgagccggtgggacgtaagatccgagatgcgggtgaggagtgggtaccgtacgtcatcgtgattggtgaggaggaagtgaagaaaggcacgctctcggtaacgatacgggaggaatccacgttgaaagaacagcggcgtgaagagatgacgttagaggagctcgtagagcggttggagcgcgaaacggagggcaaaccgagggtcccactaacgataccggatcgcctcagtcggcgtccgcggttcggcaggtaactcacgtctccctctccatcgccacaatacccgtcctagcgatttcgacgatgttaccgatatccttcatcaactcaaggagggattcgacatcctgcggctctcccacgatctctacggtgatagtctcccggcccacatcgaccacctcggcgcccgcggcccgagccaactcggccgccctcgcacggtccttcgtcctgatcttgaccagcgctaactgccgctccacagtgcgttctgggtccagctccgagaccttgataacgtcgacgagcttgttgagctgcttgactacttgctcgatcgtttgctcgtttccttttactgtaagcgtcatcctggccaacccttcccgctctgagggtccttcggcgatagagtcgatattgaacccacgtctcctgaaaagtcccgacacacgttgcatgacaccgggccgatcctttacgagcaccgagagtacgcgacgcttggacaactcacatccccccttaactagcaggcgcgtgcttatttcacggacagcccccacctaaggatggggatgatggaggccctccctagccgagggaaccgatgaggatccagccctttcgccgaccccccagtgaaatgctgtccggaggagaacggggggacccgcttgaagaaacccgtcgacgctcactgtcatctttgcttcaaatacttcaaaggcgaggaagacgaagtggtagaacggtcacggaagaaggtgttacgcgtgtacgactgcggggctacccctggaaccgcacggcgaaccctggagttagcggagagattcgaggggttcgtgttctccacgatcgggctccatcccccacgagcgccgaggatgcagcagagcgtcatcgatgacgtggtccgaattatccgtgagcacgccgacaggatcgcggcaattggagagataggtcttgactaccactacgtgaaggaacccggagagcgcaggaggatgcgagaggtcttcgagaggttcctgaagctcgcggaagagctcgacaagccggtagtgattcacgccagggatgcggaagagcacgccctcgaggtcctagaggactacgacgtagtcgccatgttccactgctacgacggaccggccgagctcgcccggcgtatcgcggacgccggccactacgtttcactgtcgacgattcacgtcattcgtggaccgaaggatgagagaacgcgggaactgctggagactgtaccgttggaagcggcacttacggagacggacagcccatacctgtcaccggtgcggggagaacgcaacgagcctcggaacgtgtggagggtaatagagttgctcgcgcgggtgaagggagtccccgtcggcgaggtagttgagaccacggcgcgtaacgcgctggagttctacgatctatgaggagaaaattttaaatataacccacctagcgtgcggttgtggcggcggccacagcggccggggccacacccgggccacatctcgaacccggaagttaagcccggccgcgtcccgggtggtactgcgctccgagagggcgcgggaagcccgggatgccgccgccgtcccccaaattgttatgaatcttaaaacgatggggggcgagccgttgaggaaaacgaacctggccgcgctggtctccgccgtagcgctccttggcgcgttggtgttggccttcgccggcggtcctaggtggcccgtcggggtgttagccctaatagtaggtgggttagacgttatgatctcgttccggcgcggcggggacagggtcctcggcctgatgggatttctactgttgatggtaggtatagccgtgctaacgggcagggtgagatagtttgaagttgtgcctggtggcgtttgacggaaggatccccatgctcagcagtatcgtcgataggttcgaggaacacgtgtcggagtacctaggcgaggttaaggtgaaaaagaaacgcgcgaaactacccgagcatgcgtactccaaggtgagaggccaatacctagcgagggccctcctcgataccctacgtggcatgaaaggggagtacgaccgcgttttagggttgacctcggaggacctctacgctccgggactcaacttcgtcttcggtcaagctcgatgtccgggtagagaggccgtagtctcggtggcccgactgctggatccggatccggagttgtacctggagcgtgtcgtgaaggagctcacgcacgagctcggacacaccttcgggttgggccactgcccggaccgtaactgcgtgatgagcttctcgagttcacttctcgaagtagaccgcaaatcaccgaacttctgtcgaagatgtaccgaattacttcaaagaaacttgaaacgcggaggttgaacggggccgtagtcgtgaccatcgagtacgtagacaaagtggggcgcagagtggtcgttcggagggctaaaaggtccgacatcccggaagttgtggagatagaagagcgtgcgttcccgaaatcaccgtatcctacgtacgtcttcctctataacctgagtaacaatccggaggggttcctggtggctgaagttgggggtaaggtggtaggatacgtcatcttcgagctccgaccgtggctcggtgagggccatatagtctcgatcgccgtacatcccaactaccggcgtaccggaatcggcacgatcctcatgggagaggccgagcgcaagatagcggaagccggatacgaaaccgtcagactggaagttagggagtcaaactttccggccagacgtttctacgaacgactgggttacagggaggaacgtagagaacacggttactactccgacggagagactgccataatcatggtaaagaagctgaaatctcccatccagtatcgacaatgacgtcgtcaaggctcttgggagcgggagtgcggagttcggtggaccaaaacgttttaaacattataacgataggtcatgtggccccgccgggatttgaacccgggctacgggctccgcaggcccgcgtcctatccaggctagactgcggggcctgctccctagcgaggaaccccgcccagtttaaaaaaccttatggggcggcgcgatcccgaccggtgaacgctaaaggtcccctcacacggtcgacaccctcaccggtttgtgggggaacctctcggttgtggtggcgcgaatacgtgaaagagatacagcgaaaagctgaaacgggcgagtacgcggtccgtgggttcgggacgagccgtaaagtgccgcacttcgacgatttggtcatcctcccagcccaagtttcgcgacctccgatcgacaagtatcgggagccgtgcaataccaagacagtcctcggcgaccggttcgcggagaaaccactgaagttggataccccggtgctggttggtgccatgtctttcggggcgctcagcaaggaggcaaaggtcgcgatcgcccgtggaacggctatggtaggaaccgccacgaacaccggtgaggggggcatgttaccggaggaacgggaagaagcgaagtggctcatcgcccagtacgcttcggggcgattcggagtctcagcggagtacttgaacgcggccgacgctatcgagatcaagatcggacagggcgccaagcccggtatgggaggccacctcatgggagagaaggtgacgaaggagatcgcggagataagaggtatcccaaagggttcggacgcgctgtcaccggcccgtcatatggacatagtcggacccgaagacctgaagatgaaaatcgagcagcttcgggagatcacggactggaagatcccgatcatcgtgaagtacagcccgggtcgagtcaaagaggatgtgaagatcgcagccaaggccggggccgatattatagcaatcgatggaatgcaaggcggtaccggcgcgtcaccggagatcgcgaccgagaacgccggaatacccaccatcgccgcgctagttcaggctgtggaggccctgaacgagatcgggatgcgggacgaagtcgacataatcatctcgggtggcatccgcgacggtgcggacgtcgccaaggcgttagctttgggcgccgacgctgtctatgtgtgcacctcggtcctgatcgccatgggatgtacggcatgcgctcagtgccactctggaaggtgcccggtgggtatctgcacgcaggatccagagctccgtaagaaactggatgtggacgaggcggcggaacgtgtggctaactacctgaaggtggtaaccgaagagtgcaagatgttggcccagttagccggtaagacggacgtacacaacctcgaaaaagaggaccttagagcgctctcggaggacgtcgcccgtattaccggcgtgaagatggccgggtccgacgtcgagctggcctaggggcctctccccgttgatcctcataatcgacaaccacggccaatacgtgcacctgatccgcaagaacttcgactacatgggtgtccccgccgagatcatccccaacaccaccgaccccgaagacgtccgcgagcgtgcgagcggtgtggtgatcagcggaggaccatcccgtgagcgggcgggtaactcccgagagatcatcgaggaactgacgggagaggtacctatactgggaatctgcttgggtcaccagctcatggcggaggttttcggaggaaaggtggactgggccgcgggccgtgaagaatacgccaggaccgaggtggagatactggaccatgaaggcatcttcgaaggcttaccggataagatcgtggcttgggcctcgcaccgggacgaggtgaaggaagtcccagatgagttcgtcgtcacggcccgctccgacagatgcgaggtagaggcgatgcgtcacgaggagttaccattatacggggtccagttccaccccgagctgaagttcaccgagtacgggccggatatactgaagaacttcgcgaaactatgtggcgaactgtaaagatggggggtagcacgacgaagttcgggttcttcaccctcgtaggttacacggcgttactcctgtccttaggagcgatcgtcgcgagactgtccgaagacaggggcctcccggacataccgttcttgctcctcctcggattcttgctgggccccatcgccgggatcgtacgtcccgagtacgcccagaaggcgtttccgttcgtgggtacgctaggactcatcatcatactgctcgacggtggattcgagatcggtatcgacgtcctgcgtcgcgtagcctctctcgtggcgaagttagactcgataaccctactgataacggccgggatatcctctctgatattcaacctcgtgttcgggctgaaacccttcagcccgatagggttcctgtacggctcgataacgtgtgctaccgatccggcgacgttgatccccgtattctcgaaggtggagttgcctatcaacatttcgacagctttaatagccgaaagcgtgttcaacgatccgctaggagtcgtgctgaccaagatgtcactgtcagtgatgggattaagcagccaccagaatccgatcctgttgttcatctcgttagccgcaggaggagccgccctaggcttagccaccggcgtggtcctcgagcgattgctcgccagagagccgttcggagagtatgtggtacccataaccttaggagcagccctagcgctctggtacatatgcgaggagctactccctgggttgcttggatacgagctgagcggattcatggcggtggcagtacttgggatgtacctgggcaacaacttgatcaagcacgactatctgaaggacgatcggacgttcctcaaggacttcttcgaagaactttccacagtagtccgtatcatggtgttcaccctcctcggagcctgcgtcagcatttcgctgctgaagacgttctggctcaagggactagtatgcgcactgagcaacgtcttcatcgcgcggcctgcaggagtcatcatcggaacatacataccaccgaaggaggacttgaacctgaaagagcggatttacctggcgctcgaaggaccgcgaggggtagtaccggcggctctggtaggcacgatttactccaagatagtatctaacccgcacgcggtaccggtagcgatcgccagcgagatgccacctaagaccttagccagcgccattctagtgaccacgttcctcacgatattcatcagcgtggttctcgaagctacatgggctcaaccgctggcgaagcgtcttctgaaggaggagtaaccctccgtctgaggaaaactcgtcatcgctcggcaggggagtgactcttcatcgggggaaaaactttgcccgtcgagaagcacgtcgaacgagccccgaagcgactagccatcgccgtaatcaccgtcagtacgtccaaattcgaggaagcggcgcgcggcgaagaacccgaggacacttccggagatatccttgaatcacggttcgagcaggcgggccatgagacgcgctaccgagtgctgatacccgaccagagggaaatggtggccggagctgtcaagtggaccgccaatcgcgtggacgctgtcgtgacgacgggaggtaccggactcactccgacagacgtgacgatcgaagccgtaggtgagatcgcggaaaagcaggtgcctggcttcggagaactgttccggaggaaatccgaagaagacgtcggcgctcactcgatcttgagtcgggccgagatgttcgtcgtcgacggcacaccggtggcgtgtctaccggggtcgccgaacgcggtgaagttaggagcggaactcctcatcgaggtgttaccgcatgttgtcgttcatagccgcggcgacgtttagggggaacttactccttctctttgatgattttctccaccaccctaacgttctcgatgcgggtgtgtgggtactgcccctcttcgtccttctcagcgtacttaaccatgtcccagagcgtgactaatccgaccactaacccggtgagagcgtccatttcgacacccgtcttcccctcggacttaactcgtaccgacatcttcacgccgtcctcgaggacctcgacgtcgacatcgacgccagtgatcttgataggatgacagtggggaactaactccggcgtcttcttcacggcgagtatggcggctaccttggcaacctcgataggatcgcccttaccctgtgggtgagattcacccgatttcaccgcgttcacaccgtcctcggtcagcctgaggaacccgctagcttcggcaatgcggatctcctctttcttcccggtgacgtcaaccatcgacatccgtcttcccccagcggtcactcctaaaggggctcatcacccacaagtggtcggtactgcgggacccgttcatcccacctcgcgtattgttacgaaatccataacaatatgaggaaaggcgggaagtcatcgcccccgcgcaagcccgccctccggggctttcgttaccccgccgcatcatccccgccgctggaggtgatccagccgcaggttcccctacggctaccttgttacgacttcgcccccctcaccccccgggggctcgcccccagcccttgcggaccgggggcttgcccccggggggctcgggtggcgtgacgggcggtgtgtgcaaggagcagggacgtattcaccgtgccattctgaggcacggttactaccgattccaccttcatgcgggcgagttgcagcccgcaatccgaactacgacggggtttaggggatttcctccccctttcggggtcggatcccattgtccccgccattgtagcccgcgtgtagcccgggggtttcggggcatacggacctgccgtcgcccccactttcatccgccttaacggcggcgatccccgcagagtgcccggcgccccttacggggcccgctggcaactgcgggcgggggtctcgctcgttacctgacttaacaggacacctcacggcacgagctgacggcggccatgcacctcctctcagctcgtccggcaaggtcgtcaacctggccttcatcctgctgtcgcccccggtaaggtttccggcgttgaatccaattaaaccgcaggctccaccggttgtggtgctcccccgccaattcctttaagtttcagccttgcggccgtactccccaggcggcggacttaacggcttccctacggcactggggcggctcgtggccgccccaacacctagtccgcatcgtttacagccgggactacccgggtatctaatccggtttgctcccccggctttcggccctcaccgtcggacccgttccagccggacgccttcgccactggcggtccccccgggatgacaggatttcacccctaccccgggggtacctccggcctctcccggtcccaagtcccgcagtttccccgccgactcccgcggttaagccgcgggctttcggcggggacccacgggaccggctacggcccctttaggcccaataaaagcggccaccacttgcggcgccgctattaccgcggcggctggcagcggtcttgcccgccgctttctacccggggctttttacaccccggtacagccgccggggctttgccccgacggcactcggggtccccccgtcgcggttgcccgcattgcggaggtttcgcgcctgctgcgccccgtagggcccggggccttgtctcagtccccgtctccgggctccggctctcaccgcccgtaccgattatcggcttggcgggccgttaccccgccaactacctaatcggccgcaggcccatcctcgggcggacccgggcggcatgggcccgggccctttcggcggaggaccgttccaggccgccccgcctatcggggattagccccactttcgccggggttatccccgtcccgagggtaggttacccacgtgttactgagccgtccgccgggccgcccccattgccgggcggccctcgacttgcatggcttagtcggaccccgatagcggtggcctccggcaggatcaaccggagttaagtgacggccgcaaggatttcgggtccgcggcggggctctcacggccccggagggcgggcttgcgtcgaccccggggcccctggggtatgttcccccagggggttgcccggggtcccatcgggggctccttcccgcggccatccccctctggaacgtggttatatattaaactttcgggcttctcggatcgcagacgtggacctctatccggttaaagagaatgacgttcctaaccgcggggacgcgcttggtatcgctcgattacatcgcgggcttcttcgacggtgagggatccgtggtggtccggttcgtgagggacggccggtaccgggcggggtacagggtctccaccaaggtggtcttcgtccagaaggagcgggatgtcctggaggagatccatgagaccctcgggatgggacacctctatcgccgtgggagcgacggcgtgtggtacctggagatctaccgacgggaggatctgcgcgagttcgtggaactgattgggaaccggacgatggtgaagcgggacgcgctcgagcggttggcgacggtgttggagctcctggaaggaggtgtccacgggtcacgggatggactggaacggattcgcgaggtctgggaggggtaggtggggtcggtcaagggtgggtaggtcatcggggcgacctccccttcgcgggcactcctcatcccgtcggttcgataccctgaacgtcggcggattccggtccccgtaggggtgtctcgcaacgatcccggaggggtcgagcgggccgcctccgggtactgtcacaggcctcggttaatgtgggccaccgcctgtgtcgacgccacgcgacgggcactcgaaggactcagatgtgacgcccgggttatcgttgtagtttccataacgatcgccgagagggtcaggagcgaccggtcagcaccctcgggattcatcacggccggtggctccgtttggggctaatcccgccatcatcccggaccctttcggaggagggtcgggtgggcggattccgatcatcccgtggcggtcgctcccgtggccgtgtcctcatccttccatctcttcgagctcttcgagcaacttttcgatgtcgtcgcgctcctcctccagctcccccagcacctcggagtcttcggcgacttcacgggccatggattcgggcatgttgaggacgtcgttaaggtactcgtcgacgtcgcggatctcgccggccttcacgtcgaggaccttgtcgcagtgcacgacgacggtcccgtcgtcgaggatgctcaccggtgcccggtacttggggaggtgtggaggcagggtacggatagggaggagactgtacaccagggcgccacggaactcgtgtactgcggtctccagcaggacgtcggcgacctcggcgttcggcgatcgtaaagcggactccggtagggcgcatccggcgaggaccgcgaggtcgttcctcacggcggctaccttcagggtggagattacctgcaggaacttctcgtgttcgccacggtgcatcgggtatatcgagtcgatcacgacgacgtcggggtcgtattcggggacgagttctcggatcctgtggggctcgaggtcctggatgatctcgcctacggtccgatggtagataccggcacggacgctgaaggcgttgaggacgaccagatcgcctttctcgtaggcttcgcgggctctcctatcgtactcctcggaacgtcgtaggaactcgtagggcgaggtgctggtggcgaggaggagtacacggaaaccgtcctccaggacgttccagaccgcgttgtcgagcaggggctgccgggcggacccgggaagacccgcgagtaccgtcacaccacgtctggggagtccgccgccgatcatctcgtcgaaacccggtatgcgagtctcaatacggtcggtcaaggtggacgccctcgaacttcgggacgtggacttcgtaaaaccctcgatatgcggagtggtacgataggactcccagcttttcgagacgtgtccggagccttccctcgagtcgacggtacggctcgggatccgcgtcgaactccagtaagtggacccgatgcgcccgtcgacaggtcggggagcaggggacgaacccctcggttacgaccaccacgttgtccgggtcgtgatcgaacctgacgtggccctccaggaagtactcgacgcagcactcggggtaacccaggaacctcccgacctcctcgtcatctagcgtgtacaccccgatccgctccgaaacgtaggggtgtaaggcgggacggacgtggagaccgctttcctcccataggaccagctccgtctcaacgatgtttatgcatatgtcgaggtccatgggcgtgagccgctggagggcgaactccgcgagggttcgtggttcgggcatgtcaccggtaccgtccaagtgggaacgtaggtcttgaaggaacgtgaggacacgctcgagcgtgttcaaccgggatccccgtgaggagctactccggaggtgaggttaatccgatgatcggacccccgggaccgaggggccgaagggatggggagctagtccgggggtgagggggtactcccgatgatcgtcctccacggcccccgaccgccctctgagggagcgttctaattatcgtaacgaaagacaggtcgagccgcacccgcgaaccgtcgtgatgatcgcgacgttgtgacgggatcgttataccgccgcgcgacggtctggcgatcgggggtcgttcttggtccgggtacggtccgtctccaggatccacgtgacactgatcgacttacacggtgggttgggccgagtagacggtagcgtgggagtgacgctggagggccctaggatcgagctcgaggtggaaccgacgggggaaggggtcaaggtcgacggagaaggagagatcgcggagaaagcggagcgggcggcgcggaaggtactcgatctgtacgggatcgagggtggtgtccggatcgaggtggtgaggcggtatcccgagcacgttggcctcggttccggtacgcaggcgacgttgtcagcagctgtcggaacgttggaggcacacggtgtcgagcactacgacgtgcgggaactggcggatgcactgggtcgaggtgggacatcggggatcggtgtggcggcgttcgagcggggcgggttcatagtagatggtggccacgtcttcggcccgggtgggaaagaggagttcaaaccgtcggcggcgtctggcgaggtccctccggcaccggtgatctcgcggctggaagtaccggaggattggcggttcgtgctcgcgatcccagaggtggaacggggtgcgcacggggataaggaagtgaacatcttcaagcggtactgcccggtaccggcgcgggaggtgggggagatctgcaggtggatactgatggtgatgatgcccgcggtggtggaagacgaccctgaggatttcggcagggcggtggacgctattcaggacttagggttcaagcgtgtggaggtgggtctacagcatcccgtggtcagggagatgatggaggtggcccggagtgccggagcttacggggccgggttgagctcgttcggtcctaccgtgtacgcggtgtgcgattcgccctcggcgcgtgacgtcgcgcaggagcttgaaatgtatatgagagaggagggtatcggcggggaggtaagcgtttccgaaccgcggaacgagggtttcgaggtgacggggtaggggggtcacctttgggggtgtacgtggccgagaacttcaccggagtttacgcgttcgatgaggaggggaacctgatagaccacgagccgttcccgaaggacccggacgagatagtggaacgtctgctgaagcgggaacgtggtgaggtgttggaagaggaagaggcgctgctgtcgagactggacgcggacgtgatcaacttcgagggtacgaaggcggaccgggagcggctcgaggaggtgttcgacggagagctggtcgtcgagttcccgaacgtggctggggaggtccttcgagagcgagcacgggagctcgccgtcgaggtcggtgtggtcgactccgaggaggagtactcggagctcgtgtacgaggtcggcatgaagctgtcgaaggagaaggtccgggcgacggtagaggaacgggatcagatgatcattcaggctatcaacactatcgacgatatcgacaggatactgaacatactcaccgaccgcgtgcgagagtggtacggaatacacttccccgagatcaacaagatcgtgaagaagcacgacgatttcgtgacgttggtggccgagctggggcaccggaagaacttcacttatgacaacatcaaggaggtgctgcccgagttccccgatcatctggccgagaagctcgaggaggccgcgaaggactcgatgggtgcggagatggacgagaaggacttggcggcggtgcagcggatcgcggaggtcgcgcgggagctctacgagatcaggcggaagactgcggactacatcgacgagtcgatggacgacgtggcgccgaacgtgaaggctctggtgggtccactgatcggtgcgaggttgatcgcgctggccggcggcttgaaggagatggcgaagttacccgcgagcacgatccagctgttgggagcggagaaggcgctgttcaggcacctgaccaagggtacgaagccgccgaagcacggtgtgatcttccagcacccgctcatccaccggagcccgtggtggcagcgcggtaagatcgcgagggcgctggccggtaagctggccatcgcggcgcgtatcgacgcttactccggtgagtaccggggcgacgagctgaggcgacagctggagcagcgggtgaaagagatcaaggagaagtacccgaagcccccgaagcgcaagcgtggtggtcggccgcctcgcggtcgtcgaccgcgtcggaggcgttcaccccggagatctcgtagggatcgccggcgccgctcacgtcgaaggcggtgacttcatttcccctgaacacagcagttttttcgggggtgagtgggaaaatggtggagatcgagatcgaaccgcatgaggagtttgagggtgtgtactgggcgatcttcgaggacggtcggaagaagcccgcgaccgagaacctcgtgcccggacatcaggtttacggtgagaggttggtagagtacgacgggaaggagtaccgcgtatgggagccacggaggagcaagctcgccgccatgatcatgaacggcatggagtacttcccgttcgaggagggttcgaaggtactttacctgggtgcggcggccggaacgacaccgtcacacgtgtcggacatcatcaaggagtcgggcgtggagtactgcgtcgagttcgcctcgaggatgatgcaggagctgatcccggtgtgtgagaagcgcccgaacatgatacccatcctgggcgacgctacgaagccgcacgggtacgctccgctcgtcgagcaagtagacgtaatctaccaggacatcgctcagccgaaacaggcggaggtcgtcgcggacaacgccgaggcgttcctgcgtcccggagggtacgtgatcgtcgctattaaggcgcgctctatcgacgtaactaaggagccggaagaggtcttcgaggacgaggagcgcaagctcgaggagcgtggcttcgaggtgctagaagtcatcgatctggagccgtacgagcgtgatcacgtggggatcgtcgcggagtaccacgggtaaccgtgatgagcgtttcgctagccgacgcgcggatgacgagttactcccgctctgagctcttctcccgatgactgcattcacccctcctgaataagtgatgaagcggtccccggagaggagggcccgatgacgaggcagccccagcccgagggatgacgacggagagccgagccgagggcgagagactttaaccgcgaacgtcgattcacggacggcgacagccggtaaggtgagtgatggggtgcgagcgtgaacgttctagaagttctggtcgtcgtcgtaccttcactctacatgggatggaccataggggccgacgacgccggtgcggccatggggtccgccgtcggagcaggtgtccgcacgatgcggcaggcggttacactgatcgccgttttcacgactatgggcgcggtgctggaagggcacaaggtggtcaagacgctgggaaagggagtcgtacaggctcacctcgaccctatcgcggccggtgcgaccgtgctcgtggcggccgcctggtaccacctggccgtgatgctcggagtaccagtctccacgacacaggctaccgtgggatccatcgccggagtagggtgcgcgctgggtctcccggttaactggagcaagttcggccagatcgccgtcggatggttcttgtcaccgatactcgcgatgatacccgcctatttcgtttctcgacgcttgcgagccgtattggagaagggtaaatggccgctcgccgagatagagcgaaagatcggatggttactcaccatctcagggtgctacgtcgcctatacgataggagcgaacaacgccgccaacgccgtggcgccgatagtgatgaccggtcttctggacgtcagatcggccgctatcgtaggtggaatcatgatcgcggtgggagctctaaccgcgggttccaaggtcatcgagaccgtggggaggaagatcactcggttggaccccgtaacagcgttctcggcggaactttcggccgcgatagtcacgcacggggcgtcggagctcggaatccccatttccatcaacgagacgacggcgggagcggtcatcggcgtggggctatcccgaggggaactcaacacccacaccttgaagaagatatttacaacgtggatcgcgagccctgtgggctcgttcgtaatgtcgtacgcactcatgcgtctctacttgtcggtgcgaggggcggcggtgccttgatcttacgcccgagtacgcgacccgcggagcgcgcactcgacgcgctccttgaagagctagacaccatgattgaagcctgtgatctgctttccgacgtaacgacgatggaggagagtccgaaggaagtcgaggagcggcaagagtccctgagcgaagaagtggccgaactcaaggaccgtgtagacgaggctatggaaagcagctccatgatcccagtcgtcaaggaagagttgggctacatagccgagaacgtgaggagagccgccgagacgttgctgagtttggcctccctactggtgagcttctacgaggatttggaggaggaggatcgcgagaagctagacgaagtgatcgaaggtatcgccaaaatcgcctcgggagtacgtgaatcggtcgagttgttgaacgaggacgtacggaaggcggcggagcacgtcgaaaagattcgggaccaggaagaggacgttcggtcccgactacgcacgctgatgctcaaaaccgagaggaacgggcgtctagcaccgatcgtcctggaaatcgaacgggcgctcgaagacatggaccgagcccttgacggggtgaacaggattaaagtgaggttcctcgggtgagaccggtggaggtcctagggaagcgctgggcccacccgatcgcctgcgcttccggggctctcgccgcccatcggccgggcatggaaaatgccgttctacgcggtgcggcggctattttcacgaagacggtcactgaatcaccgcgcgagggccatccaggaccggtattcgtggattacctcgacgagggatacgcgctcaacgctatgggtttaccgaaccccggcccggacaggatggtggtggaaatcgaagagttccgggacgaattcgacgtaccggtatacgcgagcgtggcggccgacggtccggagggtttcaagaggttggcacgcgcgttctccggcgtagcggacggattggaactgaacgtctcgtgccctcacgcgggcaaggggtacggggcggaactaggctccgatccggaggccgtggccgaaatcaccgaggccgccgtccgggcgttcgacggaccggtgtccgtgaaattgactcccaacgtggaccgcgaaaccttgctcgaggtggctgcggcggccatcgatgcgggagcggaggcactcaccgccgtgaacacgctgggacctggccttaggatcgacctgaggaccgccagccccgtcctaggagccggggtaggtggactgtcgggccccgcgctcaaacccatcgcgctccgcgtcgtggcggacttagcgctggagttcggggaggaagtggagatcataggagtcggtgggatccggaacggggaagacgtcgtcgagttcctgttcgccggtgccaaggcggtgcaggtcgccacggcggctcgagagaaagacttcggagatatcgcgatggaaacctcccacattctcaaggaactcggatacgatggacccgaagaggcgatcggagctgcccttcctgagtaccgggagaggctgcgccgattggggtggtgtcagtgaagccaataccggcggaggtcgtggagaacagggaagaatgtgagcggacgatcgtgctcaggctacggccggagaggccgatacgttgggaacccggacaattcctgatgctcgggatctccggagtcgacgagaagccaatggcgttctcaggaggagacgaccgggagttcgaactcaccatcgagatcgtaggcccattcacggagcgttgcgccgacctcgagccgggggacgtggtctgggtacggggaccgtacgggaaaccgttcgaggtgagaggttcgagggcagtggtagttgccggaggaaccggggtagcaccactggttccgctcgttgaaaggctacgtcgagcgcgcgtccacgttacctcggtactaggaggcccacacgcggaccgcctccctaggaaggatgatctggaaaagttgtccgacgagctgtacgtcaccacggaggacggtagcgaggggcgtaaaggatttcctacggacgtccttgaagaactcgtcgaaaaggaatgtccggatgtagtgtacgcgtgcggtcccgaagggatgctggtccgggttgccgagatagcacgagagcacgatgtcccttgccaggtcagcgtcgtccggtacgtgaaatgtggcgaaggaatctgcggctcgtgcgccttagggaaggggctactagtgtgccgcgacggtccggtgttttggacggaggagttggaaggtacggagttcggaggggtcagacgtgacgtcacgggaaagcctgagtgacgtcgcgttcgtgctaccggcgcacaacgaggagggagcggtgggaaaagtcgtacgcgagattcggaggatgtaccccgatgcgctgataatagtggtggacaacgcgtcttcggatcgcactgccgaagaggcggagaaggccggggccctagtcgttagagaaccggtcaaaggtctgggaaaggccatcaaggcggggattcagtgtgcacttgaacacggcgctcgtatcatcctccgaacggattccgacggggagttcgatccgaattgtttcgccgaactgattgaagccgcggatgattacgacctggtgataggcaacaggttctcagagggtagaccggagaacgtgccgctttctcactaccttttcaatatgatactgataacactcttctggctgttttatggaaagatcttggacgtcacgtgcgggtgccgcgtgttctccagggaactcgcgagagagatcctgaaacgggacgtagacgacggtcccgcgttcgacgccgacaccacttcccttgcggtatctttagggtactcggtcaaatccgtcgatgtaaggctacgtggtaggatatccggacagaggaaagtagcccccacggtgatcggtaaggtccttgtcggactcaggatactgttcagggtagctgtgaataggcttcgatggcggtgcgaaacgccttcgactttgagtaggggacaatagcgccacccgggtagttataagttcgatccacaggggttcctggaggggacaatttgggactagctgaactccgagaactgatcgaacccgaagagacggacctgagagccctcgccggtcgggagatcgctatcgacgcgttcaacgccctgtatcaattcctgaccacgatcatgaaggacggacgacctctcatggactcgaggggcaggattaccagccacttaaatggcctcctgtataggaccgtgaacttggtcgaagagggtatcaagccggtatacgtgttcgatggtgagcccccggacctgaagcgtgaaacgctggagcgtcgacgggaacggaaggaggaggcgatggagaaactgaggcgggccaaaacgaaggaggagcgggagaagtacgcccgacaagtcgccagactcgacgagtcgttggtggaagacgcgaagaggctgttggatctcatgggcatcccgtgggtacaggccccctcggaaggagaggcgcagtgcgcgtatatggcgaggtgcggggacgtatgggcgacaggcagccaagactacgactcgctgcttttcggcagccccaggttggttcgcaacatcacgatagtcggaaagcggaagcatccacacaccggcgagatcatagaggtcaagcccgagatcatgaggttggaggacgtgctcgaccagctgggattggaatcgagggagcagctggtggacctagcgatccttttgggcacggactacaacccggatggagtacccgggattggtccgaagcgcgcgctgcagttgatcaggaagtacgggtcgctagacgagcttaaggacaccgacatctggcctaagatcgagcggcacctgccggtggaaccggagaagctcagaaggctcttcctcgagccggaagttacggacgactacgagctagactgggacgaacccgacgaagagggactggtcgagttcctggttgaggagcgtgatttctccgaggatcgagtccgccgcgccgtcgagcgtctgaaggaggcacttcaggagttgcggaagggcggtcgccaagagaccctggacgcgttcttctgacccgagattccaggcggcgtcgatggagctcaggggtggatctccgaacgctcagctcgaggtttgttcagaaacccccgagcacaccgagtggaggcacccctgggggtccgaaggtcaggtatcctatcaccatcccgtaaactagcaacagcccgatgtccgcgagtaagttgactgtagagagcagcgacccggaacgaagtccggtgatcgcgaccgtcactggcccgcaactcctcagcagtcttcctacgtacgctaaggccgcgccggttacggcgagggagtaagcgtgtgcgtagtcgagcaccccggatcgaagcatcgtcccgaccgccgcgcatccggccaccgggttagccaggaatgtcatgggcacgacgtacccacctaatccgcgtaggtaagatgataggataatccccaacagagccccgggcactaggtaagcggcgatacggccgacggtgcgagtcgcttcgttgagggcgtcccgaaggctcccgtgtgtggggagttgtgcacgtacccgacggaggagaagtccgccgacgatggtctcggtagcgtccacgagggctagcgttagagcgtacggcccacccaccgtcgaccccagcaacgttaacgcgttcacacacgctgtagcggtgtaagtggcggagttaaacgaaaccttggcgatgaggagctcgcgtcccttgagacccatctctcgggccgtcgtcaacgccgcgtggggatgaatcaaaccaacgacaacgagcggtacggcacgacatcggattttttcggacgcgagcgctccgagcaagtgtaacccgaacacgctgacaccgataaccagcagcgcctcaagcacgaactcggccacttcagcgatcaaccggtttcccccgaggactttaacggcggagacggtgcgtggtaccggggcgtcacgttgggttcgctggagacggagcccgtatcgttatctctcaagcggccgttccggatatcgggccgggaagttagacgagtgcggggttattggtgcacgtgcgtcatcgagggcaactccgggagaggattcggactccgtcgcggtatcgccgaggagatggcgacactggacgccgtagctaggaggtatgacgagccactgtgcagggtctggggaagggagccggcctcgatcgagtcgttcgccaccgtggatctggtgggcgcagagcaggccgagaagctcgcgcgacgttactacctcagagggtatcggaaactgaaggtgaaggtgggcggagatgacctgaagcgggatctggagcgtgtcgaggcctgcgtgaagtccgccgagttcgacgccctcatactggacggaaacgagggactgacggtcgaagaagtattccggttgctagatttcctggacttcgacggtgacgtgtacctcgaacatccgacaccacccgatagcctggaagaagtgtgcgaatcttgcgaggcacccgtgatcgtggatgtaatggatttgggagcccgatccatcgacgacgtcctcgacgtcgcggaaccctgcgatatcgtgaacatcaagacacaggaggtaggattcgtcggtggtttgaggttagcccgagacgcccgggaagagggtttcaaagtgatggtaggatgtgccgtcgagagcttctcttccatatctgccgccgctcacttagccgccgccgtggaggccgacttatgcgacctcgatggccacctgttcctggacgaggatgtcgtgagcaaccccggatacgcacccgtgatggtcaccgagggtcccggatgggaagtccgcgtggagcggcctaagcccgcgtaataggacatgagctgatggctggaggtcgttaggacactccactcccttaacgactcactcttcgacactttaactcgataaccgtcgagtgggggtaatcatcgaagtggaaaactcgtgacgggaggtggttcgttggagttaccgcataagcccgggacgcccgcgatcatactgtgtcacggggcgttcgacgaacctcatgggaagacagcacacggactgctccggttcggacgcatttacgacatcgtcgccgtgatagaccgcgagctggccgggaagaccgcacaggatgtggatccggatttcccaccggtgccgatactgcggtcggtgagtgaggccttagaggagctggatccggaagtgctgctgatcggggcggcgccgcccggtgggaagttaaccccggagtggaaagaggaaatcatcgaagctgtccaagcgggcctggatgtggtgagcgggctccacgagttcctctcgaaggatccggacatcagcgaggcggccgaagaatcaggctcacggctgatagacgtgaggaagcctcggaaggagttgttccgagttgcggacgggtcggccagggacgtggacgccacggtagtgctcacggcggggacggattgcgctgtgggtaagatgtcggcggctatcgagctcgtggagcgtctgagggaagagggagtagaggccgcgttcttggcgacaggccagaccagcatcatgatcggggcggaagacggtgtcgtggtggatcgtatgcccggggacttcatggcgggggccatagaggagctggtcgtccgcctggccgaggaccatgagatcgtcgtagtagagggacagggtgcgttaagccacccggcgtattccggggttacactggctatcctgcacggcgcctggcccgacgccgtggtgttggtgcacgacccggttagggaggtgcgggatgggttcccgaggttccgagtccccgacccgcgcaccgaggtgacgctgatcgagtcgttaagcgcggcggaaatagtctcggtagttttacgcacgtgggacgagaggctcgcggagaagttatcgtccgaaggatacctggtagaacgtctaggcgacctcagaaggacggtagatagggttttagagattcaccggatggggcgctgagtcaccttcctgagcgaggagtagataccgtaagtgaggtcgacgacaccgagggcggcgatagtctcaccctcgtccttgatgggtacaactacgaccggcgttccctcgtaaggtcccgattccggcaccttcctgatcacctcacctttctcgagcacttcctccagaactggacccgtgtactcgtcgtcgataacctcaccgtcctcgattctgaccccagggttatcccgggttcgcatggtcacgggcaggcgattgaccagctcatgaactgccatcgcaagcggtaggatatcttcggcggtcgagtcgggtctaattctcatcacgactgccccggttctccagtggagcggatactttaacggagttctcatcgggacgttcggtggggatcacttgaagccgaagtgctatcggtgcccttcacccggagacacatgtgatcgctgcgggctcgccgacggggatcagatggagcgaaccgtggaatcgtaccgacgggacgaactgttccgaagcgcctcggagatagaggtagaagggtacatggaatggacgcgggtcgaggagatcgcggaactgtgcgagaggatggtgtggaaaagcgtcggagtagcgttttgcgtggggttagccgaagaggccagggcgctatgtgagttcctggaggggcggggcttagaagtgtactcagtctgctgcaaagtcggaggggtaccgaagtcgaaactgagtctactggagctgaaaccgggagataaagtctgcaacccgcggctgcaggcacgattactgaacgaaatcggcacggatctgaacgtgctcgtcggattatgcgtgggtcacgatatcatcttcatcgaggagtcggaggctcccgtgaccgtcgcggtggtgaaggaccggaggctggcccactgtccagccttagccctcacgaaccggtattacaggagaaagctcgggttggagtgaaaaaaatcaggcgaggccgagcttctcgagtacgggcgtgcagtcgatctcgtgcgtctcgagggcgagctcctccgggtccattccgaacgccagaccggccagctggcagtagtggaacaccggtagcttcttcggtgggagcttctcgaagtgctccttcatctcgatctgtccacggtcgaactgtaggtggcagaacggacagacgttggtagtgcagtcggcaccggcttcgagcatgttgaagatcttctcgcgggtgaagtgaagtgacaccttgagttccctggacctcacaccacctcccgcaccgcagcacatgatcttgtccttgtagtcgacggactccgcccctagggcctcgacgagctcgtcgagcgtcctcgggtcctcgaccgaacctgggaacccggtcacctccgacggcttcagcaggtggcaaccgtagtgaaccgctaccttcagcggctcaccgtcggtcttctcgagcggcctctcgaccttctccttgatctttttgacacctacctcctcgtaaaggaaggtgttcacgtggtagaccttgaccttacccttgtactccctgtcgatctcggcgagcttttcgttcacgaactcgcgcagttccgggttctcctgcaacaggtggttggcttcgttcagggatccgaagcaaccgttacagaccgtcagaatgtcgtatcctttctcctcggctatcgacaggttgcgggctgcgatcgtaacccacgtcttgaggtcgaaggacccgaacactccgggcgccggacagcaggaggcaccgtccatgtcgacgagctcgtatcctagttcctcgaagactaaacgcgtggccttctcgatgcccggatacctgttcggcatgatacaaccaaggaagaagcagagcttcttggccaagggtcaacccccttagtcgaccagatcaccctcctcccaatcgtacccgatcagtttgtcgaactcgttgatcttgaccagcttctggacctcttcgagagcttcctcataccgatgtgtcgtcggtggtacttcgtcgaggccgatgttcttcctcacctcgcggatctcatcgttgatcggtacggcgtgcccggtctttatcacgaacatagccaccatcctgtgagccttggccatgtaccccttcttggccgcgaggttccgggcggctttaacggcgtctacgatcttcacaccacgtgggcagcgttcgtagcacgtgtagcatgtggtgcacatccacagctcgtcgctcttgatcacttcgtcgacgagtcctaactggagcttccgcatgatcagtcgggtgcggtaggaggttcgtcgtccgctggggcacgagcccgtgcatgtaccgcactggtagcacgcctggaccgacagtacctcttcctcctcgaacacgggctcgacgagctcgctcagttcttctaggaagtccgggttgagatcctcctcacggatgacggtatctcgtggctcgaccaacgcgcggccctgaagggttccgcccagaagaacctttttacgatacccacccggcaccgcgtgtaggtacgctcaacgtcaacctgcggggaacggctccgtgaggttagacgtcgacgtggcgatcagggtgaacggagtactcctaacccccgaggagctcgagttgctgctcaagttgtcggaacacggatcgatgtccaaagtggcggaggagaagggtgtgacacggtccgcggtacacaaacggatcaggaatctcgaggaacgtctcgggtgccgactggttgagtcgagtcctctcggatcctatctcacggagcacggacgcaggatagtgatcaagtacgtgaacgccaaggctagactctcaagaacggaaaccacggtagcgtgttctgagaccgtaatagaagacgtcctagccgctctaggtagagaacacgatgtcgacgttatcgtgccgcctcacgagaaaatgagacgtgtggaggcggacgtggtggtcccagacgatcccgtgatagtcttcgaccgctccgatgaggccgtcggcgaaccggtcgtcgtcaggcgaacgcggctggtacgggtcggtgacggaagtgggttcgtcgaggtgcccgggagcgcgcagcggatatacctcacagatctccgcaacagggaggagataaggccgaaaatgcgcgtaagctattacgcctcggccctcgaggctgttcgggacggaggaatgtggaccgtggtacccgaggagctggcccccgagggtgacgatcccggtcctcactacaccgtgatggcgttaccactcacccgagacggggaggacctcctcgatgttctggaaggctagcctcgtaggtctcgtgacattgtgcgcggttttggcggccgcaggatgtcaggaaatgagagcgccgccgatcgatcagccgcaagggccgccgaaggtatctgaaaccggcggtcaaccggcacccgcaggaccatccggtcccggttcaggtgctcctggagcaccacaaccttcctcttggcagacgttcacgagcccgctgtactccgtacagtgggccacatccgagctaccttggttccccataggtctcatagtagcgatagcgataggatactatgtggggtaccgaaaagggccgtcaccgtgggaataacgcggacactacgggatctcggtcactgagtgacccaccacgacgaacgccttcgtagacatcgccactatcaggcactcatccgggaccttcgcgtaagcacgcgaaccgttgcatccgagcgtgaagttaatgccgccttccttcatgatcttgcccactccatccccgcacagggactggatgccggagaaatcggagtacaccctaccaccttccgggtacaggtacgcctgggctattttcatagcctccttcggtttgcataccactaggatgacgtccggtaccacttcgacgccggtggccttctcgtaggtgatcgcctcgaacacgccctccccgtcgaaggccttcggtaccagctcgaccgtgcgtttggaagccgagagtgtagcgtgctgcccgagtccctcgtagtagaacttacccgtccgcacgggatccgggatgtcgtcgagtcctatggcggcagacccgcccttgcacgcctgctcctccggggtcgcgtagatattgtccatctcaccacgagccaccgtcatcacgaactcgcaatgacggcactcctcccccacccgctcgtagtcgtcaggaacgtctccctcgctgagatacagcttcattgccacgggatacaagtcgaggtctagggtctccatgagtgattcggcggcctcgcggatcctctcgggttcctcgacgcagatgggcatgagtccgcccccagatcgtttgttctcggtcgttcgactatcgagcacttacacgtattaaaagttacgaatcataattcactggtaaatgggggtggacgattgagacccttcttgaggcccatcgtggtggaactggtccaggggacggccgagctccgaccggaacgcgtgctctcgtgtgttttcggtatcaaggaagacgaggcggagctgtacttaaaactgctcgaaaactcggaggaagcacccttcaccgtcgaggatgtagccgagatcatcaacaggagcaggagcacggctcagaagatgttacaaagcctcgtccgggtagggatggtagagcgggagcgcgagacgttacccggaggcggtagacgttatttgtaccgccccgcaccatgggagaaagtaaaagaactcgggctcgagaacctcaggatagtctgtgaggagatcgagaggtggtttcgggagttcacaccgcactgagggggaagacgagatgtccgaggagaggagaccgttcaaagccgagaaagtcgagactagggacggggagatactcctcagatgcccacgctgcgatgcgttgttccgcgaccagaagtcgtactctaggcacgtgaacaagtcccatttgtacaagaagaaccgcccgaagcggatactcaagaagatgaagcgtcgcggggacgtgttagttcaggattgacgccaacctgtggatggggaacaggctgagcgccgaggcctcgggcccgtgacgagagaacccggagccgactacatgctacacacgtaactcaccacgcttccacagctcgatcacgcgcttcacgatctttatggtactgtccaacgggcaccgttcgtacttctcgatccgacgaacctcgcaatcaacaccggcgcgttcagcccaacgttcgacttccttctcatcgatgtcctgatcgggtcccagaacgacgacatccggtttcaccgtcttcagggtgatggagaagtcccgtggatggcctaagatcgctcgatcaacgggtttcagcgccgaaaccatccgtacacgctgttcctccggcacgatcggggtcctcttcaggcgtcgcacggtttcgtctcgggcgaccacaaccacgagctcgccgttctttccggctattttcctggcttcctcgaggaacgcgacgtgtccggggtgaaggatatcgaacacacctcccgccagcacgcgcttacccacgtgaacgctcccccgagtgtgaccgaagtttgattaaccccgaactaccgggtgtcttgacggcgcggggtgttagtattggcccgggtgttcattcacccgcctaacagtctgattctccacgatctggtcgagaggttcgggcacgagccactctcactgccgaaagagataagcaaacgagtgcgagacccagagatcgactcacccccgatgaacgtaacccctcaggacgcgaagcgaggtctgaagtacgcggccgtggaggtcccttcgggtgtcaggggcaggctggccctgatcggtccactcatagagaaggccgacgccgccatcgtagtcacaggcatcgaggacttctccttcggctgcctaggctgcgacagaacgaacgagttcgtgacgtacctagttcgacgccaaggcataccggtgctggagctggagtacccgaaatcggaggaagaagcgaaagcgttcgtccgtgaaatccgagacttcttggagtcgttgtaggggtggtcccgtttggccgtccagatcgctcagctctcgtgtggcacggagtatagcggtgtccaacccgagatagagcgtgcggccgaacgagtcggggccgagatcgtactccccgaggtagacatcgatattgtagaggaagcctgcgaggaggtcgggtacactccgaagagtgcgaacctgaaagtccttctcgcccgcgcttacgcgctggccaacggatacgcggaggccgacgccgcgatcatcctgacgtgcttcaggtgcgccgagggagctctcgtgcgtagcgaggcccgacggtaccttcaggagaacacggatctcccagtcgtcacctactcgttcactgaggacctcgacgccagcgagttactcacgcggatggaggcactagtcacgatagtggagcggaaggggctactggcccggaagaggcaggagggactcaccctcggtatcgactccggttccaccaccacgaaggccgtggtgatggaggacgacgaggtgatcggaaccggatgggtacggaccacgaaggtggtcgaatccgcggaaaaggccgtagaaagagcgttagaagaggccgggtacgagctcgacgacatcgaggcgataggcgtgaccgggtacggtaggtacaccctcggccgccacttcgacgctgacctggtgcaagaggagctcacggttaactccaagggaacggtgtacctgggtgacaagcaggagggcggcgcgaccgtgatcgacgtcggcgggatggacaacaaggcgatcaccgtttgggacgggattccggataacttcacgatgggcggcgtgtgcgcgggagcgtcgggtcgcttcctcgaggtggccgcggaccgtatcggcgtggacctggacaagttcggtaagctcgcgctagagggagatcccgaagccgtgcgtctggacagttactgcatcgtgttcgggatccaggacctggtgaccgcgttggctgagggtgcggatcccgaggacgccgccgctgccgcatgtcggagcgtcgccgaacagatctacgagcagcagctccaagagatcgacatccgagagccggtgttcttcgtgggaggaacctcgctggtcgacggcatggtgaaggccttagaggacgtgatcggcgtcgaagtagtcgtgcccgaatatccccagtacatcggggccgtcggtgccgccctcctggcctccaactacgtgtgaggggatccgacggtgtacgagcacaggggaaagaggatcctcgtaagagcgtccgaaaaggaggcggccgagctgtactacgacatcactaggcacgcggccacggacctgggactggcgagaacgatcaccgcggccgtgttccacctagacatcgaggccccgctctacgccgccgcggtgcgaacgcgtcccatgctcaggccggtgacgctggggaaggtctcgcacctcgagctcgacgatgaggagggtactctcaaggtatcggtcgccgtggagcgctacttccccgatgtgatccgaacgttacagagtgtattcggagaggatcgcgtccggcacgaagagcgcctcgagattacgatcgagccacccgaggggatgagtcccgaacatctcgagaaactcgaagagctcgtcgtccacgatcctcggaagaagctcgcccacagggtgtacgatttcatcgagcgggtacggccagaggggttccgagtggcccgatacgcgcgcttcgatcaggacttcctatacctggccagcgaaggcacgctcgaggacgagtggaccgacttactcttcgagctgccgggagagctagatcgtgtcggagagcgccgggggccgagtgagtgagaggaccgtgtccgaacgatcacccgtgttacgtcggggagcacgggaaattcgtgaaggtgcacctacccgtgggcggacggtgtaacatccactgccgtttctgcgaatccggactcgagcacgagggagtacgggtggattatcccggacgtgccgtccgcacgatcaccggagacgaggctaggacggccctcaaaagggtaaaagagcactgcggacgcgtcgacgtcgtcggaatcgccggacccggcgacccactggcgaactgggaggacgtgaaggagaccttcgacgtcgtcgccgaaacggtaccggaggcgaaacgctgcctgtccaccaacggcgtgtggttacccgatttgatcgacgaggtgacggagctcgtgcactcggtgacgatcaccgtcaacgcgctggaccccgagatcgcggccgatatctacgatcgagcactgacacccgaaggcgaggtgttgaccgggaaggaggccgcccgatggatcgtcgagaggcaggaaggggccatggacgcgctgaagaaggagcgctacatactcaagaaggtcaacttcgtgctcgtccccggtgtgaacgaagacgaggtcgaacgcgtcgcggagcgcgccgccgacgcagggtttcacgccatgaacgtgatccccctcatcccgggcggcgacatgaaggaccaccgaccgccgacgtgccgggagctctcgagggcgcgggaccgggctgagaagtacatcaccgtgatgcgccgatgcatgcagtgtcgcgccgacgtgatccactgccgcggcagaccccggctgatctgggagctgctagaagaggactgaccccctgggggtcgcgagcgtgttcgaaaccgtgatctacgaagggggcgtgtacaaggccgacgagatgcgcgacctggtcgaggacctcggcgggttcgtcctgtccgagcaccagatgcagctggaggtccacatggttctagccgtacccgtcgacgacctggacgtcatagagcggaaagcggaggagctcctcggagagataaggaggatgccgctggccggtaccgagatcgcggtcgtggggatgagcctggcccgtcatcacatgccacatcccgtgtgtgacatcgccgagtacctcaggcgtcacggcgccaagtccaacgtgatcggcttggccagaggttacggacgcgagctggcccagctgcgcacccgggagaaacgtctccttgaagaacacgacctggtgatcttcgtcgtagggaacttcaaagattgcatcgagaagtacaagctgccgctggtccgacggatagaacgcgtgccggtcgtcgtggtgggaggtccggaggagatcgacgccgacgacgtggtgtacgtgggaggaataggtagaaagccgtaccggttcaggaagggtcgcgagatcacgaagctcgacgagatcgtcgacgtcgtctcgaagatcatcgaggagcgacgacaggagctggctgaggacccgcccgtcgtcccaccgatggtagtgaaagatcgaatcaaccgggagttgaagatcgaggagaggttcacctcccccatgccgatcacactccagctcgacggtcttcgggtgaaggcaccgtacgacgagtgggcggatcgagtggcggaggtcgaggtcttcggttggaagctccgggagatcgcggacatcaggcgatcggagatggacgatcacatcttggtgaagatcagacctaagagcgcggtgacgggatgatcgtacaccgtaggtggtgatcggaacgccacgactacttccctcccaccccacgtggtcgaccgggagacgcctccgaacttcgtttctctccaggcagtttagacggtcgcacaactaacaacctcacgtcacgatcgatcaccggcccggtgatgtaccatgccacccgccctcgggagtatcccctcacttcctacgcgctaaaactgtcaggcggcctcccgctgtttcaccctgtcgtacagtcctacccgctcccgccagtagcgacgggcttctctctcacccctccataaacgtacgatgcgaaggctgtaccaggccggccacggggccaacacgtccactaagatgtcccgaaccgttccgggtaaccccctgagtacgctgtcgatgatctctttcccactgccgggccatccgagccgacgcaacgggttgaactcgacggaccttaggatcgaacaagtccgactgactccctccttcactatctcctcgagtttttggagcacttccgcacgatgttcggcagacatctgtgcaagctgcctcagcaccggtacgagggccctacggaccgccctcgccacgaaccacttcgccttcctgtgctccgacaacctcggtgccgcgagtcgaatcgtttcgagccattcccgtaagaattggacggactcgttgtcttctctgcccaggtagatggtacggccgcgctcgcccttccgcggcttccaccgagcctcgtagtacggcccatacaccttcccgttcaccgaccgatacgacgcacccaggaacggtagagtcccccgttccaaagtctccaccaagacccgaaacacccgaaccaactccacggggtcttcgggtacttccatcggaacgcccaaccggaccggatcgagtaccggtggccctccaggcctgacgttcattcgattgacccccactcccagtaccgaacgcgcttaaaatcctttcgattacggacgcacaatcttggcgttgggcttaaatttgtgcgaacgttcattttcccgccagaactgctgggacggccagaaccatggtggtcgagtatggtaagggggcaaataatttaactgacccggtcgagttcatggtcagatcaacgctcgcacaaatgagaatgattggaaagagagggggcgggaagggaggctcccaccggtcgggggtcaaggcccatgagccgcggcaccaaggccggcatctaccgagatgtactcgttattgaagttttccccggggcggtccccgacacggggacgctccgagccctgaacgagagggagcgtaggttactcctagcggcagctggatacgatgtcactgagttctgggctagaagtttcataggactgctcttcgaccatcctacgcccctcgttagggcatccgagagacacgagaaactgttaccggaggcgacggtggcggcagtccgcgagttgtgcgatcgtatcgaacccgagaagttacggaagatccgtagccgtgtggcctccggggagaccccgagggaggccgtgcgtcgtgtcctcggatccaagatggccggagccgtttccagactactcggtcgtgttatgggttacgtacagtccgacccgctctccgtggccatcaccctccaggtgttaggcaccatgatcgcagcggacaaacgcctagaggacgtgtcgacggttttggtcgtcgtcccgggcctagagcacgtgcacatcgacgtatatcgactggcacgaagggtttactctaacctcgtgagggcgatgaagtccctcagacgctacctcaaccctcgagttagggtgcgggtgtacgtagccacgggaggtaaactggaacatccagcgggagattcccccgaggaggagctgatcgaggcgtacgaggagctctcaaggaggcccaccgtgagacgcttcttcccggagcgtggccacttcaccgaggtaccttgggaccgagcactcgctgagttttttgtgcgagttatccgaagggagctccaccgtaggtctctgaaggtagttcgggctgcgaagcgggagggtgcttcgggtagagagctgtctgaagtgtacggcagggagtacggtaagtggttgagcaggtggttcaaacgcggtcgtcgatggctgaactttcacagacctagtccggcactctccgatatctcctgctgcttcgtagcgtcagaggcgggagtagaaggataccatgaggagttcttgataaaggtactccagaaggtgttgagagaagtcgtcgaacgcagggtgacaggacgacggcttgtgcgaaaaatagtcaggaagatcgccagggtcctaaaggaggacttcagggtcgaagggaagatacgcgaagggattctccacatggcgaggctactcggtggcagacgcaaagccgcgttaggtggcaagacactgctcgaagcgttcggggcacctccaccgagttgagggtatcttcggacggtaaccccacgatcgtgagcggcggaggtgccgacaattgttacgatttcaataacatttgaatatcgcaacgaaaattcttttacttgcagttaattcagagcccgatatacagttattcatcgagctaattcctctactttcattgagtgaacgagggtaatagtagacggttatggcgcgcgatggcagataagtaaccaaataacgtccttttttatttggacttctattcgccaaccttccacagccgagagtgtgaaactgcgggcgcgaggaagatggacgtgaagacgttagtcggagagtactacgcctcacttcccagcggcgtgttacgagagttcgtggaagacccgagctcccgcgagtgggcgtacaccttcctaaagggacgggatatcgtattcacccgaaagcggaggttggacgaggtctcagggttcttagagctgtatcactcgactgggaagttcaagaacccgaaatcgtgggagggactcctcggctgggatctggtgatcgacgtggacgcggagcttccggaggagcccgaggcgttcctcaaatcgctggggaggctactcaaggatgtagtgatagcatgcgacgagttacgtcgggcgttagggttcccacgaccggacgtggttaatttctctggatccaaggggtttcacgtgaggtacttcgacagcaccgtgcgacggtggctgagatgggacttacacgagcgtcgaggtataaagccgggcgagatcatccagcgggtgggtcgtggagtcgtatggttggcacgtgagggtttcgtggctggggacagagtgcgtgcactccgcgaggggctcttggatgactcgatgtacgatctcaagagactgatccgatgcgtcggatcgatgaacgtcaagtcgctactccccgcagtgccggtgtggtcgcgagaggggggtcggtgggtggactttcgggacgaggtcctaggaatgaacgatttggagctgggatgcctggtcgcccaccgcacgttgacctggcccggccgtgggggattgggcgtagtactttcccgcgtactcgacttagacacggatgcagatccggaggatccaagcgacttcgtcgaggtatgggggaacgtgatgtcggtgctgggggagcttaagccgtgaggttcgtggtgccgttcgcggataggggggatcgtaagacccggctgtcctcgtgcatggacgaggagacgcgtgagcggttcgcgttggcgatgctaaggcacgtggtaagggtgctctccaagttcggcgaggtagaagtggtaactccggactccagcctgtcggtgccggggacgaaggtacgacggagtgacgcgagtctcgacgagctgccgcttccggacggtgagttcgggctggtgatgtcggatctaccgttgctgtccgaagaggacgtcgagcgggcgttggaggggttgaaagacgcggatgtcgttctctgcccgtcccgacgaggtggaacgagtggagtgttcgtgaggaagggtgtacggttcaggccgacgttcggtggtgtgagcttccctaggaacttgagacgggcggagaagcaaggggtggaagtcgccgtggtgaagtcgttggggttcttcgccgatgtggacgagccggaagacctgctcgacgcggcgttgttggggaggagggaagtggcgaagattgcgcgttccgtcgtcgaagtctgacggcaccttttgtgcgactttcattagagagtcccgtgagacgacacgcaccggagggggccggattaaagaagcgtggagcgcgcccgggcaggggggccgccgttgttatctcgggaggaaattctcgagatcctctcggagtacgatctcgaggacctgtccatagctacgctcggaagccatactgcacttcacattctaaagggcgccaaagaggaagggcttcgctctgtggtagtctgtgaagaaggtcgcacaacaccctacgagcgactcggggtcgccgatgagatcatcgtggtagagcgcttccaagacatgctcgacgaggaagttcaggagcgtcttcgagagttgaacgctatcgtcgtgccgcacgggtccttcgtcgcctacgtgggtctggacgggatcgaaaacgagttctgcgtgccgatgttcggaaacaggcggctactgcgctgggagagcgagcgctctctagagcgtaagcttctgaagcgggcgggcgtgaaggtgccgaaggtgttcgactcacccgaggacatcgaccgcccggtcatcgtcaagttccctggggccagagggggtcgtgggtacttcatctgctccgatccggaagagttcgaggagaaggcagagcggctgatcgaagacggcgtgatcgacgaggaggatctcgagcaggcacacatagaggagtacgtggtcgggaccaacttctgcgtccactacttccggtcggtcgtggaggataccgttgaggtactggggatggatcgccgttatgagaccaacatcgatggcctcgtccggatgccggcaggcgatcaactggaagcgggactggagccttcctacgtcatctcgggtaacatccccgtggtcgtgagggagtccctgctggtgcagctgtacgagatgggcgatcgcgtggtacgcgcatccgaggatatcgaggaacccggcttcatcgggccgttctgtctacaaacgctgtgcaccgaggacctcgagttctacgtcttcgagctctccgccaggatcgacggtggtaccaacgtgaccttcctgccgtacgcgtacttgaagttcggcgagatcgtgaccatgggtcgcaggatagccaaggaggtgcgcgaggctcgggacaaggggctcctcgaaggcgtcgttacctgacctctccgggcaaaaataccgttccccaagtcgtcggccccccgggctgctgctcggcgttacccttcatcctaaacgttacgagtattgtgacgttgggggctcggatatgctcctgatagtcgcgggacacgatcccacgggagccggtctcagggcagacatagcgacggccgaagccctcggagtaccggcggtttcgctcccgacgttgctatcgctccaggatgagggcgtcgagctagtcgagcccgttgactcacggttcttatcggactgcttggcccgatacgtcccaaggtgcgaggtggtcaaagtcggggccgttcctactctgaaaaccttcgagatactggcgaaacggctccgtgacctgacggtagtgtgggaccccgtgttcagagccgaggccggaggggagttatccgaagcgactcctgaagaggcgttggaaacgtttggggaaacagtcgatatcctcactcccaatacggaagagctgagtcagctggtcggaagggaggtacgcaccacggtggaggccgagctcgcagcccgtgagctggtggaggagtacggcctgacgggtgtcctcgtcacggggggacactccgtcgacagacgcgatgtgtgggtgccggctgaggggaacaccatcgcgtgggaggtgcctccgggtgaaggcgctcacgggtccgggtgcgtgctctccacggctctcgcgtgcttcttggtccgcgggttggaccctgagaccgccgtagaacgagccgttcggttcgcgagagcggcggtccgagaggcccggaacacgcccttcggccgggtggcagatcccgtcgcacaaattcgacgtgacgcgacattggggaaggcaacgcagcacgtgatccgggcactcgagatcatcgagtcggacccggccttcgcgagggcgatcccacaggtcggaatgaacgtggcggaggtcttcgacccctcccggggtcttgaaggtgttgtgggactctcgggtcgaatcgtcctcgacggtgatagacccaccgcggtcggtcgcccggttccggggggctccaagcacgtcggcaccgtggctttgacggcacatcggctcgacccctcggtccgggccgcggtgaacgccaggtacgacgaggagcttatcgagagggcccgcgatctcgggttcgtagtgtcttcgttcgaccggtcggaagagccggaggaagtcgactccacgatggagtggggcaccgaggtggcgtttcggagggcggacgacactcccgacgtcgtctacgacgagggcgacgtgggtaaggaaccgatgatacgcgtgctcggaaagagtgccgtggaggccgtgactaagctgagaatgttgttgggatgtgttgttggggtgtaagggagtgagctcgttcaaacgactgctttacctggacgtgatctcccgaagtcacgcggatttcgccaagagggtgatcaggaggttagagcccaaggtcaaggtgagggtggagtgtctctcgaagtacgagcgggaggacgacgcgctgacgtacgacggtcggctcaaggacgaggaaccctggaaggagttcttacggcggctgggacgtgagagttccgacaccgtggtagctaccgcgctgaacgtaccccccgacgtgccggatatatctccgaacccgaccgtggttataggagtgaacacgggcgatcatcccaagacgttggaagtcgcgggtcttgcggacgtggttgttgtcggtcgtcgcctatactcaccgagcaccggccctcgtgagttcggccgcgtacgctcggggaggctcaggaacggtacggtgatcgtggacgtcgaggacctcggcctacggtacgccagcaaggcggtacccgtaatcgcggttctagtggcggaaaacggtgttgacgggttgatccgggatctcaggcgtaaccgcgtaaggaccctgacggaggaagtcctccgggatctatcgctctcccaggtataaggtgacgccaatgaaaaacaacactgacgacactcatattgtccatcctaagccaccctacctacctcacactaacatgagctagttcaactcgacataagttcggaccgacatgatgtgacaggttactacccattatctcacccgaaaactatttatacaagcaattagtggtcccacgtgagacaaacactgggccacaaggtaaacaacatgtccccatgggagagacatgcgtgagcaaagcgcaaatactagttgtccttgcgatgctgtccgtaggactacaatcggtatcagcggcaccaattgaaggacagttcgtcgaggagaatgactaccagtggtcggttcaggtgacccactgcgagcccaccatcgacatgaccaagtacccggtgatcgtgggcgaaaaggccgtctatctggtgctgttagatgagagggacgttcagaaaggagggggtctctgtgactaccagccggccctgatgccggtacccaaagattacgtggagatttccgggaacaagctgtcgttcaaagtcaacctggagggtcagaagctcccgttctactgcatgtacttgggtgtagatttccccgacaagctggtgatggtgaccatcgaggagctggctaagcacagcgtgaggtacgattggggctacattagcgagccgaaaccgctgacgctgagcttcctgaggaagatcgtcgaggcgttcgagtcccaagtcgacaacccattcccgcacagtgccttcaagaacgaggccgtttggaatgccgttagggacacgccgtacatcatcagcggaccggtgcacgtgtcggccgtcgactacggaactgattacgtggaactggagatcgagatcccggtgagaactgatgtcaccgagttgacaggaacgatcgaggtgaagtccggtgagagtacgcagactctgagcgtaaccggctccgacgtggtcaacggcgtcatcaagaagcgcgagtatcgcaggcctcggataccgtggaagtgaccatccaactgagcggtgtcgtcgaggggcagcaggttaccgacgtttaccccgtgacgatcaccgtccagctggtgaaactcaacagctcggtcaacatcaccgtggagaagatcacggagtcggaagccgtgctccgcgtggattaccagatcaacacggagaactgcagcgtgaagtccgtggaggtgaagctgctcaaggacggtaacgtcgtggcgtccgaagagaggtcgcaagccgagggtacggtgaggttcacggtgaacgagtccggcacgtaccgcgtggtgatcgaggccacggtggagtggacgacaccgtcaggtagacacgaggagaagctcaccttagcgtccgaggacgtggaggtaacgctatcgcgactcgaggtaggtgctcccagcgtgaaggtatccgactacggcgccgattgggcgaccctagagatcacggtaccggtaacggccgtcggatgtgaggtgaccggtggaaaggtggaggtgatcgaagcgggaaccggacacacgctcgccacgaccgaagcgacggtcgataacggagtcctgaaggctaccgtcaaactaaccggtctgcggagcgccaggatcccgatcatcgtccgtgtgaccgccgagggtaagacgccgaccggcgacagcgtaaccgccacggccgaagcgtcggtcgaggtacggctggcgagcgcggagctcggaggaagtgtccgagtagagagtccgcgaccctgagagtgtgctacgagatccacacgcagaactgtacggtggagtcggtgacggtcgagctgctcaagcgtacggatcagggttgggtagtggtcgatcgacgcacgctgagcgcgaccagtgacgtcgtcacgttccgggtgtccgaggagggtcagtacaaggttaggatcacggcccagtgcacgcacggtgtcacgatgacggccgaaaccgaaccggtgaccgtgcagttcctgccgaaggtcgagatcagtggattcaaggtggtcgaaacggactacggtccggactgggtagagcttcggataacagctgacgtccacgtggagcgggctgagaaggtgagtggactagtggtcgtcgaggacgctaagggcaacgtactaggtaagttcccggtcgagataagcgaccacatggatgttaaagtgcgtctcgaagggctagaaaacgtatcatgagagcttccagtagtcgtcaagcttcggatcgaagctagtaacaactcaggtaagagctgcggtgaagtgtcggttaaaacatcactgaaactcgagcaaacaaccactgagtctagcacagaaacatcctacgaacaggagacatcatcgacaactggaggtactacaactggaggtgctgagacatcctcaggatcgtcggtggagagtcacacagaagctagtgaatcgagtggagagaacaacggtggagaagctgagactgagacgggtacggtgacgacgaccccagcccagatcaaggacctcaaagccgttgtggagaaggtgaagcctggacaggtaataattgatgtcagcggtcgggttgaagtgaagcactgtcggtctgagataatactagtggtgatctacaacggtaaggtgatcaaacgaatcaccgtcaaactatcgaatggtactttcaaggagaagattgaagtcacggggattccattggttgatccagggcagctaaccgttaaactcgaggtgaaggtatccactaaaatcgtggcttccagggacattaaagtggacattccgagaccagtgggagtaacagtggtgcctgcgaagggtaagaaatacacggttatcgtatattaggacggatcagtgtacgtagttgatgagcaaaatagagttgtggacagtgtcgtactgtcgaagaaggtgaagcggatcgtagaggtacgcggtgaccagctggtaatcgagactcagaccggagaacggtgcatcctcaaggtcgacgagagaggtgaacttaggcctgtcaaattcttggtgatcaagtcggggagctacgaagtatcagtggccggtagtgctaaggctaaggccaaggcccgcgccacgccgctgatcctgatactaccgatcctgctcaggctagtcaggaggagcacggcctgaggcgtttttcgacgccctccgtcattttttggatcgcttatgtccggcgcacgcccacaggttcttccacctccagaaacgttattcgtaccgtaacgtttcacggcgcagggatgccgcttgcgccggtataggatccgtcccacggatttcgttgctgttgtgtctcatttcgaagcgagagaattactgcgcgccgtgaggaagggtggagagattgagatccagctagatctaggcctacactccgggaaagcccgaattaacggtgataccgtcgttattgagggtgtggagctaacacgggacgaactggaatctatgacgggatggaaaggcgcttacggactgactaccgataatgtctacaggatcgagattcgggctgagcactactacaagctcctgccggtaagacccggcgaagcaccgacaatcgagattgacggcatcaggatgcaccgtacgaagtggacggatccctggactgatgccggcgtcaaggtgggtaaggtcggggtgtccgagggagatcgtgtcctcgacgtatgcacgggcctgggctacaccgcgctgcgggcagttgagcgtggtgcggaggtaatctccgtcgagaaggaccggaacgtcctcgaaatcgccggtgcgaacccttggtcgcgagggttggaggaagtggagatcctgttggggcccgcggaggaagtggttccatccctcgacgacgaattcgacgctattgtccatgatcctcccagactcgcgagagccggggaattgtactccgagaatttttatcgggagttactgcggctcctgcggcccggcggtcggctcgtccattacgtcggagctccggggagccggtatcgaggaaaggatgtgctcgcaggggtgtccaggcgtctcacacgcgtagggttcgaggtggtggacgtggaccgaaggtgggggttggttacagctgagaaacccagcgctcgagtgtaggggtgggtaagaacgtcccaccaccgacccgtctgacggcttccgccgtctcggcgatccctgcgcggaataggtgggtttcacagtggcaatctgagcatccgaatcctcgaatcccgggtaccatatccgccagtgccgccgctagctcgcattcacggtcgccttccattatccaagcgccctcgacctcaggtcgtacctgggaaagcaggtgatcgatatgccagtggggtcgctccgttccctcccgagccgattttaagtgacgcccgaggcgacccctgagcccggaagacccttgccccatgcccgatccgacgtaggtccagctcccggcctccacgatcacgtctcccaagcttcctacgttcaccttgacacgtctgttcacgcggaagacgagagcgtacgagccatgatccggtagcacgggggagtacccccagttgttcggcgacagtcgtttggttctggcgttgctcgtgatcctggtgggtgcgacgatagccaacgcggggaacctgatgtacccgctcttaagcagagactcgcgcgctcacgtgctcaagatatggtacacataccacatgcttgccgacggtcgatgggacccgtggtgcccgatgtggtactcgggattcccgtacctcacgtattacggttccttggggtacctactcggcgccgccgtggacgcgatagtcaaggatccggtacggacgttcgtcgtctgcctgatcgtcgcctccgcgttgatcggagtgggagtctacgcgctcgtgcgggctcgagggtacgcccggaaggtagccgtgatctgcgcgcttctgggcctcacctccggagggttcatgaaagcgctgaactgggagggcgtgtacccgacgattctatccctggggttcgggttcctggctctttcctgctacgagcggtggttgcggggtgagaagcgtcacctggcctacgcgacgttactcctggtgcccgcctgctactcccatccgctcggcggtctactttccggagggttgattctgacccgtgggatcgccgaagccgtgcttcgggagaagcttcggacccccaggttcctgttgcaatccacggcacccgttgccatcgggatcgcgatcgcgttctcgcactacgcggcggcgatctactacaagaggttcctatcggagctgtggttatatccaccaggttccgtggcgggagttctgaaagacctgaccgtggggggtaagtggtctaccggactgctcgtaacggtgaccggcatcgtgggcgtcgcttacgagattcgacgtcgtaccgggttcggtttgttcgtgttgttctggggtatggtctcgatcgtggtgaccttcgccttcgttctcgggtactggaagtacctccctctcggcaagaacatgctcgcggagcgttacacgactgtcctcatgccgatgctgctcgcagtgacggcggcccccgtcgttcgtcagctgctccggtcggtaaaagcggcttgggcggcacccctcggagtggcagggttgcttctctccggtagcgtcggagccctgacgtacgttcctcccgagcccccacacgtcacgtcatcggccatgaagttatggaagtggatgggggacagctggccggacgactcgtatactgcccgttgtgatgccgacccttacacgcatcttttcgacgcgagcgttccgatttcaccgatatactccgggcacccgacgatcatggggtggttctcccaaggagacccgatgttcttctccctggccgcccgctgggagtgggagctcggttgggtgtacgatcccaacaccctcaaaacctcgctctgggcgaccaacacccgatacctgctgacgaaatcctcgctgctgtcgaagaagttgtcccaggagccgggtttcgtgttacggaagaaggccggtgactaccgtgtgttcgagttcttaggccatggtggctccgcgtgcgtcgtcccacatcctatcgcggtagtggatcgtcgcttgggcctcaggaccgagaacgcgtactacaccacgctcctcaacttcgtcgcgactcccggcaaccggtacgtgttcgtcgacgccacgttctgcgacgcgaggaagttcgacagagtgatcgtgagacctctgacgccgggtgacgtggaccgggcggtgaagctggctcgggagggtcgtaaggtactgctcatcctaccggtctccgacacacgagttgcccgtgccgttgaacgtctcggtgtcagggtgagtccggccagtccgccttccttcgttcccctccggaagtacctaccgtccgcgtaccgagtggacggcagatggtggaaggacgtgcgcgtcggtcacgggctcgtccgtgtgtgcggtgtggacgtggtatacttcaccatgcggttccacaggctcatcaaggaggtgcaaaccgaaggataccgcatgcccaggctaccgacggatgaggagcggaagttcgtcaacggggtcttgcgagggttcgattccgggaaacccactcaagttcacctggagtaccgcggcgaccctgctgtgatgcgggtatgtggtaacgggtgggtgtacctgaaggtcaagtacttccccgcgtggcggtcctccgacggtcccgtctaccctgcttcatgtggacagatgctggtgcgagcccacggagacaccgtactgaggtacgagttaccacagtccctgtcctacggctcttacgccgcggccgtactgggtaccctggcgctcggggcgatgctactatggatgtaatcagagccatactggtcacactggcgctgctgtacggggttggatggacgtcgaccgtggtgaactggacgatcccgcacgagatggtccggatgagtgcggggatctaccagtcgacgggggccaccacacagctgacgttgaacccgtaccggggaagggcgaccctggcggtggcctacgaccccgccgttctggtgaagttaggcgaccgtgggaaaccggtgcgcctatcaccgagctcgctgcgtgtcggtagggtcaaggtgaagtcgtacggcgacgcggtcgtgatccacggtccgtgttccgtccgtccctacatatccgcacacggtgtccggtactccttcgacatcatcgatacacccgggttctcggtctacttcaacagatccggttacttggtgctcgtcagccacggtaagacgacgaagatacgcgtccttccgctgataccactgatctgaggggtctcaatcgtgcctgagctcccctacgtcgccgtccccaaacatatggcggaacgcgctaggagggtactgtctcgagaggatcttctcgccaaggacgtcaaagcgcgacgagaagaggacatggtgctttttcccgtacgcgatgccggacgtgcgggcagtgtgctcgaagaactcgggataccctacgaagcgggtgaagccgagttcgaacggacagtcgaacaccggagcgtagaggaggtcctcgaagacagcttcggatggtccgtgcccgtaccttacgacgtgatcggcgacgtggccgtggttcaaatacccgacgagctgcgtgggcacgaacgcgaagtcggccgggcgatcatgaaagttcaccgacgggtgagggcggtcttcgagcgcggtcccgtccggggagtcttccgcgttcgggacctccgccgcatagccgggaagggccccgcggtgaccgaacatcgagagcacaggtgcaggttccgggtcgatctggcgcggtgttacttcaaccctaggctggccaccgagcgccggttgctcgccgaggacgtcgtggaggaaggatccacggtactcgaccttttcgccggcgtgggtcccatcacggtgatcctgaagcggttcgtcccgagcgtagaggtgaccgcctgcgaactgaacccagtcgcgtacaggtacctcctggagaacctccggctgaacagggtcgaggcgagggccttcctgggcgatgcacgcgaggtgtcgcggctggtggggcggttcgactacgtgatcatgaacgtacccaagatggcgcaccggttcgtcgaaaccgcggtacggtgtgtacggcccgagggtaggctgatctactaccggatagctccgaacgccgaggaagcgttcgaggagctccgtaggaaggccgatagaccggtggaactcgagtctcaccgggaggtgaagccgtactccccggaggagtcgctttaccggctcgtggtccgcgttcactgattcagacgctttctcagctcgtggagtaggatcgctacggcgcctacctcacccacgttacgctccgtacccacgtacacggcctcgtcaccgagctcgagctcctgtttcgtcaatcccggtctggcgctgccgaagacgaagcagacctccctctcctgctcgatctcttcgaccacggcgtcgaagtccagcggcttcgccccaccgtgctcggcatcctcggccatgtacgtcacgtccggggagagcgccttcagggcctcctccaggtcctgaaagaacaggagctcgactccggcctccaggcagatcctctgcgccttgggcaccccttcctgggccgcgctaccgagtgctctgctgatgacgaaccgcttcgccccgaaaccggccacggtcctggccatctcctccaccttcctggggctgtgcacgttgtggtacacaacggtcacgggaatcacatggaaacccccaaataataatactcaaacgggtcgtcgggggcggtcccgtgaagaaggtggtagccctgggcatagtcatcgtggcggtcctcggcggtgcgctcggatattactattacacgacgacgtccaacgtggtccggatcggttaccaacccagcgaccactccgcggccctcttcgtggccatggccaagaagatgttcgagaaggaagggatcaaggtggagacgtacgagttcaaggccggaccgccggagacgcaggcgctggcggcgggtaagatcgacgtcgcctacatcgggtgcgtcccggcgatcacggcgtactccaagggtgtgccgatcaagatcgtcgcgggagtgaaccaggagggttccgcgatcgtggtgcgtaaggacgaggccggcaagatcaaggacatcaaggacctgaagggcaagcgggtcgcggagctcatgaagggatccatccaggattgtatgctgagaaccgcgctgaagcgggcgggcctggaccccgataaggacgtggacatcgtcgagatgaagacggccgacgccgtgaacgcgctcggggcgaagcagatcgacgcgttcatcgagcccgagccgggtccgacgatggccgtcaagaaagggttcggcgtccggctaatggacaccggtaagatctggtcccaccaccagtgctgcgtgctcgtgatgcggaaggacttcatcgagcgccacccgaacctcgccaagaaggtgctcaaggtccacgtgatggccacgaagtacgtgcaggagcaccccgacgaggccgccaagatcacggcgaagcagctaaaagtacccgaggaggtagagaaggaggcgatgcgacacgttcgctactccgtggatctggacgtggacagcatcaagatgttcgccaggttcctcaaacagctcggttacatcaaggaactgccggactggtccgacttcatcgacctgaaactgctcaaggaggtggccggttagtgatacggaacggcgacgagcgactcgagaccctgctgaaggtatcggcgccggtcgccgtgctcgcgatctggcaggccgtgagcggactcggcctgatcaacccggtcctccttccccctccctcccaggtcttctcggtgttcgtcgagatgcccggggagatactgaaacacgcgctgaccagcctctaccgggtggcggtcgggtactcgatcgcggcggtcgcgggagtctcgctgggcgtcctgatgggaacgtaccgtacggcccacgccgcgatggacctcctgatcgagatcatccgtccgataccgccgatagcgtggataccgctggccatcgtgtggttcgggatcggcgacccgtccgcgttcttcatcatcttcgtgggctcgttcttcccgatactgatcaacacgatctccggtatcaggagtgtcgaccgaatctacgtcgaggcggccctcaacctgggcgccgacgacaccgcgttgatccggcacgtactggtgcccggggcactgcccaacatcttcaccggtctgcgggtgggactgggagtcggctggatgtgcgtcgtggcggccgagatgatcgcggcgaagtccggactcggatacatgatcatcgaggcgcagcgtatcctggcgaccgaccaggtcatcgcgggcatgatcacgatcgggctcctgggcctcgtgatggaccgtgggttcagatacctcgagaggagggcgctcgtatggcggtgatcctgaaggtggaggacctgcacaagagctacgacgacctgaaggtgctggacggcatcacgttcgaggtctcggaaggtgagttcttcgcgatcgtaggccccagcgggtgcggtaagacgacgctcctcaagataatcgccggactggaggactacgacgcgggcagggtcctggtggacggcgaggaggttcgggagcccggacccgaccgcgccctggtcttccaagagtatgctatcttcccgtggaagaccgtgctggagaacgtcatgttcgccccgctgatgcagggcaaggacccggaggaggccgagcgcatcgcccgggagtgcctcaaggtcgtcccgggactcgaggggttcgaggacgcctaccccaagcaactctccggcggtatgaagcagcgcgtcgccatcgccagggcgctggcggccgagcccaggatcctgctcatggacgagccgttcgccgccgtggacgcccagacgcgcaacaagatgcaggaggagctcctgaaaatatgggagagaacggggcagaccatcctcctggtgacgcataacgtcgaggaggcggtgttcctggccgaccgcgtgatggtactctcacccaggcccgccgagatagtcgatatagtcgagatcgacctaccacgaccaagggacaggaccgaccccgagttcgtcgagctgcgggcccgaatactcgacatgatcggaagccgatgatgacaagagggttagccgaaccgtgacgagcgtttgccggtccgaggccctcaggttctggaaacgactgggctgtacctcgctcacgttcaacgccccgatgtcgggccacacgggacccgagctggcgcccgagctggagcgccacggcgtagggatggtgatactcggcggttaccccggcgacgacgccacttaccgggcctcgaagctggtggcacgccgacgggacgagttcgcggtgccgcccgaccgcttaccggaggagctgtcacgcgtcgacgtggagataccggtggccgtgaacgtgaggttcgcggacccccgtgaggccggggaactctccggtgaactggcggacctcgtggacgtcgtcgagatcaacgcccactgtcgacaacccgagatcgtccgagccggcgcgggcgaggcgctgctcgaggaccggacacggctgatcgagatcgtcgaagccgtggcggagcacgacgtgtacgtctccgtgaagctccgcggaccgcaccccgcgttcgaagacgcgctggaagccctgcgggactcgtcggtggacgtcctacacgtggacgccatgaaacctggcgaaccgacgtacgagctggagtacgtccgggcggcggctcgggtcggggttccggttatcgggaacaactcggtccgcacgcccgaggacgtcgaccgcatgttcgaggccggtgcatccgcggtgtccgtgggtcgaccgatcctcgagggagactgggacgtcctcgaacggctcgtccggtacaccgtactgaggaaaagtagcgaaggggcaggacttgcccgcacgtgaggaccggccgttggccccggctcataagagccaccgattcagggcactgtccgaccggtctcagggtggcggtgcacccgattaccccctacctctcccgagctccccatgggagctgcggttcatcggttcggggttatgggtggcttgtgattcgagggcaagacagtggtacagttcgaacccgttaagtactccagctccggttcgggagggtcatcggtggccctcgttagcaggttataggccctcacgatgtcagcattcatagtttttccacactttgagcagatcactagccctccgttccgtttgcatttacttctgcacatcggacatgttaccgaagtgtacgcaggactagcctcaatgacctctataccgtactcttcacatttccgtttgatctcccttataattcgcttgtaggcccagtatgctagctccccatgcagcttttggcgtaagcctttaagatcctcaataactaatagcgttacctcacgactgagcaagatctgaactagtttgctcaccaaatgccggatcgcgtccatgatcgcccggtgagctttaacgtaatactgtttcagacggtgagagaaattagccccatttttgttgagtcgccgctgttctttcggggccttgatttttctccagtatgaccaccgagaccatgcgtcaccccatcgtaccagaaccggtttcttcccatctgagaaataaacagcggcgaatatgcggcggccgatgtcaacagctgcggcgttctcacagttatttccagtccgaggtataggtcgaacccgaccatttggagttagccgagagacgagccagctttcgcccttattcaccttcatattcaaagtaaggtaatgagcgttatctgcccaactatagacgatctcgctacgcccgaagaactccttgccgtcgtctccgtttaggataatcttatccgctcttttgggttctttcactcggttcgggtgccagggaaaccatcccacgaactcgagcctgacaccacggccgcgaccacgcttaaatccgacgttggggaggttgtcgacgacatcgccaagtcctaagatttcaataacgccacgatgttccaatggatcgtactcgaaccgtcggatctgggaagctaggaatacgaatcgcggttccctaccgagcggacctttccagtatcgtggaggttgacagatcgttctacgtttgttcgactttacctctttgatttgtttgaaataagatcgccaagcttcagtgttcttttccccaattgcgactactgtttgagtacctaaaattggcccatattctctataaattctcctgaatgtaagttctgacctagaaacggcgacagcatccaacttgcctttgaagaaaaatcgacggcgaaggtagtttaactcgttatacacggcggtacatctgtcactgaggaaaatcaggtctctgcggtacccctcagggccgacaattttgagggtgatcgagcggtatctatagtcggacctaagtggcacggatagtaccccttgacgtgagcaggttcttggtcgcagcgtctgaaccaacaatcaatataaatctccctatgatggcctgaaatgggcgcgggggcgcccgagcctggtcgaagggggcggacttaagatccgctggccgtagggccgtcccgggttcaaatcccggcccccgcaccaagcgagaatcgttatgagaataataacgattactcggactgaagcgacgctccccgcggcgacagttcacgtacgtcggaggtgatgtcgagctcgcgggcggtttcccagggcccctctggggggggcacccgaggagcgtcgggggaacgcggtaccgtggtgggacgcggtcgttccttggtatccgtcctgcgcaccctgctgaggatccccgcggtgcgacgatctctggtcgtactgtcgtcaatcctcctgacgtccacggtcatctttcacttcctggagggatggccgctgctgacctgcctgtacttcaccgcggccacgataacgaccgtggggtacggcgacgtcgtccccaccacggaggcgggtcgcctgctttccgtcatcgtcatgttctccgggatcggcgtggcctcgtacgccttgggagacatcatccagctcgtcttccgaggggagctctccttggcgatcaaggaggacgtcctccggaagaggataaaggaggtcgagaaccacatcatcgtgtgcgggttcggcaggacgggtagccgcgtcgccaggttactctcggaacggtacaagttcgacgtcgtggtggtggataaagacgaggaggcctacgagcgggccgtataccaagggtttcccgcggttctgggcgacgcgacgagagaagacacgctgcaggaggccaacgtcgagagcgcccgcggtatggtggtggcgacgggtgacgaccgcaccaacgtcttcgtgacgctgctcgcgaagaacttcaggcgggacctccacgtcgtcgcggtagccaacagccgggaaggtgccaagatgatggagcgtgccggggccgacgaggtgctcttcctgtacgactgcgcgtcccggcacatagtacgggctgccctctcccctacgatgttccgggtgacggtgcggcactccgtggacgagatctcggacgtcatgtggatcataatcggcaacggcggtgtggtgcagtgcgtggagtactacaccccgcccttgaaatccccgatccgtagggacgtcgtgataagctccatggacgaggtgatgaggttcgtcaagagcctggagaagtaccccgaaaggaagcgaactctggaggacctctacagggtctccgagaacgtccacacttactacgtgatcgtccacaacgaggaggagcgcgagcgcatcctccgtgagctcgaccgacgcggctacctcgtcggcgtcgacctcaccatcgacgagatcctccaagagatcgagcggctccgaggcgagtgactcccgcgtccactaccaggcggccggcaccccgttaccaccggagttcgccggtcaggcactcatcgtcacggtaccaccctcctcggaccccttttccttgtaatcgcctccgatcgacgctcaagccaccaatcctctcctgcttctggaatgtactgaaagtccggaatacttttattgtctcgcacgattacaaaagaatggtcgcgaacccgtccggggtggcgagagtgtcctggcagggcgccccgttaccggccgatccggtggaacgcattcggtgcttgcgtatccttcgagaaacgtaccggcgtagggccaagccgaagccgcggaagacgtaccggaagatcgcggggaggacgtacggcccgtactacgtcgcgtacttcgggcggacgaggcggcaccgcagggtccggctgatctacctggggaagtcgaacccgagcgtggatttcgtcgagtggctggccggacagtcgagggagcgcgtgctcgagctcgcccggctcgccgtccggcacctccgtacagcgctcgagacgttgtcccacgaggctcgcgatgccggggatgtacgtcgactggtcgcccgaatcctggcactcgccttcgacctcgagcccgcgcgctcgaccgggctccggggtccgctcgagcgcgccccgaggttcgtgaggaccgtactcggaccctgggaggcctggttcgcggagaacgtcctacgtaaactcctctcctagcgatagtacggggtggtgggcgccgagcgacgtccagcccgagctcgggcgctgaaggactgagattgagtacgggcggtagcgcggttcccccgattcgacgaccacggaggtgcgcacctcgccctgcgtcgtgttcggcccgttgggcctcgcgccgcccgctcgagcacggaaaagttattagtggctagcctcgcgattaattgttggagaagccggggcggccgagcccggtccaaggcgcgggacttgagatcccgtggcccgtatgggccgcccgggttcaaatcccggccccggcgccaaacccggaatcgttatgaatactgtaacgttattccgaccgggcccgtgggttcctgactatcctcacaccctcaccctccgtcacccttccgatcgtcgttagaccgaactccttaaccacgtcctccgggccgcagatcaggaactcgtagtcctctcccccttcgagcgcgaggtccaccgggtccacgtcgaactcctgcgcgacttcctccacgccttcgtccaccggtaccttccacgtgtggatctcgatcgccaccccggatcgtctcgcgatcgcttccgcctccgccagcagcccatcgctgatgtccgtgacggcggcgcgatagccaccccgcgcgagctccacacccacctccaccggtggtctcggtcgtgcgaaccgctcgtacaacgtttcctctggttccataccgttgagtatggcccgcacgaacgcgttgggaccgcccaacggtcccgtgacggccaccacgtcaccagggcgggcgttcgacatcaacagcggttcgcccttcagcttccccaggcacgtacccgagaggacgagctcctccccttccacgacatctccgcctatcagggacactccgaactcccgcagtccttcggatatcccgaggacgagctgctcgacgtccacctcgtcgtcgaggcacacggagaacccgaaaaagctcggttctccgcccatagcgccgacgtcgctcaccaccgaagccacgaacttccagcccaggtcccggtccctgagctccttcggtacgtgcctggatcgggtcatagcgtcgaagttgacgacggttccgtccgggaggacagcagcgtcgtcatcccctgctttgactcgtggtccctcggtgggacacgcctccacgatgagttcgatcagttcttcctcctccttcggccgccacgtccggggtgacggtctcttgaaaccggagctcaagcgcgtcccccgcgaagagctcgagtcgatcgcgaacgagatggctaggaagttcaactgcgaacgtgtagcctccgtcgtgagatctttccacctcatcaagctcgagggtaggtggacagagtacttcgtcgtgaaccgggttgatttcgacccggccgatttgcccgagcgcgcggatccgttcttagtcggtcgacccttctgcgagaggtcggcccggggcgacctccgaattcacgtcgaaggtgcgcgcgaactcgcgcgccgcgtcgatgaaataaagacttacgtgacggaacgggcggcggtgctgttcacctacggtcgagacgtgctccccgagagtatcgtcgaaatccggggtccgaaggagcccagactggtcgcggtggtgtatcgtgacgatctgggggagcattgcgtcggggtgggtcgccttcggttctccgaagatggtcgtcccgtggtggataacgtgatcgatcgtggctggtatctccggaggggaggttgagatgctggccatcagcatggacgtggagaacgttccgggtgctcttaaagcgatcgccggcgtcatcgcggaccacggcggcaacatagtccacatccagcaggactccgagggtgagctggcccgtctgtacatggagatcgaaggcgtggagcggcccaaagtactcgtctccgagctgagatcactggacgtcgtccgagaggtccgcgtgctgaggcctttaaaggagatatacggtaagcgcgtgatcgtgatgggagggggcgcccaggtcgccgaagtcgcccggggcgcgatcaccgaggcggaccgtcataacatccgcggtgaacgcatcagcgtggatactattccgctagtcggtgaggagaacctggcggaagccgttcgggccgtagcccgcctgcccagggtaggaatcctagttctcgcggggtctttgatgggagggaagatcgcggaggccgttcaagagctccgcgaggaacacgggatacctgtgatatccctgaacatggccgggagcgttcccgaggtcgcggacctcgtggtgacggaccccgttcaggctggcgttatggccgtcatggctatctctgacgccggagtcttcgacctttccagggttcgaggtaggaagttctgatgggggtgcttccatgctcctcgagaagtccttggaggaggcacctgtggtgaaccgtaacgggtactggtacttcattcaccctattacggacggtgtcccggagctcccgcccgagttactccgtgaagtcgcgtacaggatcgtccgcgccttagacagcacggacttcgataagatcgtgtgtgtagaggccatggggatccacctgggagccctcctatcagacatgctggatcgtccgttggtcatagtcaggaaacgggagtacgggttggacggcgaggtggagattacccaggagaaagggtacggtgtggagaagctgtacctgaacggcgtgtccgaaggggacagagtcgtggtcgtggacgacgtgatcagcacgggtgggaccctcgtcgggttgatcaacgccctcgacgacgtcggggccgagatcgaggacgtggtggtcgtggtggccaggggaggcctcgatagggtcagggaggaaaccggggtcgacgtcaagtacttggtccgagtggaggtgtcggaggatggtgtgagcgtcgtcgagtcgcgctatcgctgatctttgagaacgcggatccactccccttccgcctccctggagcttccgacgatcgctatcagttcccccgagttcctctcccgctcgagctttccggagacctcgatcacctcaccctcgaacgcctgacccacgtaggtgtgcgtgtaactcctcacctcggtcacttcgtacccttcctcggtgtccgattccaccgcttcgaccctccatcgcgcgggatagtcgaacgccaacgaatcgtcgaggacctcgcagaccagtcggacgttctcttcgacggtctcgaactcttcccaccggacgtcggagagttccgattcgtcgcgtacgagcagcacgtcacacactcgatcaccgatgaccaccctgttccccttacgcagctcgtgccgtaggaactcctcgaagtccagctcgggggatctcctccgatagacgcgctcccattgatcgtagtccagcgccctcagaagatctcgaccctcgccggtctcctgaatccgtaggatcgcatcacgtaccgcgaggaactcctgaacaccgtagacgaccaaatccaggtccgattcggccggatcgtggagctcggggagtagcgatcccgtgactccgaaccgggactccggtaccccggagtcctcggcgagttccagcacggccctcgcggccatctcttccaggtcgtccctgggctcctccaagatcctctccatacgatccctcgggtgtaagtgctccactacgtcctccggtggcaccacctgatcgtagaagtcccctcggaccttcctgacatactccggatgtcgctccctgaggatctcgaacgattcctcgaaactcactttacggtacctctcaccagtgggtcgacgaatcctgtcgccttctggatccttcacgtaccgcatcagcgccaggaaaccgtcctccggatggacgtaggatatcaccgagaacacggcatcctccgtcacgaggaagtcgcgcagcatcgggtacaagggggccaccccgctgatcgaggagcgtgttgaaggcgcggagctgcgagtggtcaggttggaacccggcgaacggttcccggagagcgtggacacgagcagatggcggaactccgtcgtggtttccggtaaggggagcgtccgcgcgctccggtggaggttgggggacactccagtcttcgagacccgcgggaagttcgagctgatctcactggaaggcctgctgttcgacgacggttcctatcacctgcacgcgtcggtatcggacgagaacgggcacacgctatcggggcacgtcaaggggttcgaggtttacaccaccgtggagttggtgctgctccggttgaacgcacgcctcgagcgtggacgtgaccctcacaccgggtacagggaacttacccgcgttattccgtcagcacgcgacacccgcgctcggtgaccactaccgtatgctcccactgggccaccggttccccgttcacctcgacgagctcggggtaagccttcacggctcccagcttactaagtctcagcagttcgaacttcaccctcggagccttccccacccaacgtcgggcgaaaggcagtgacttccggtcctcgtagatccggtgcaggttcaggcgggatcgttgattagggttccgcactgagaaaatctcgacggtcgagccgggtttcacgtctccctctccgtcctcagtggttacgaacggttcgactgccagtaccattccctcctcgagcttgtcttcgtaccctggtaggtcgtcgttggggatcgaaacgccggcgtgtaggttccacggttcgatctgatgtcctgtgagtccgataaccggcttgaaaccgcgatctcgacacacctcaccgatggccctcccgacctcgcgacactcgacgcccggtcggatcgtctctatggccgcttcgagggcctcgcgggcggcctccgccaatcgctcccctaagtcgttgtcgaaggacagcgtgatcgccgcgtccccgatggcgccgttaacgtgagcgcctatgtcgaccttcaggatgtccccgggcgatacctcgacctcgtcgtccgggctcggcgtgtaatgagcagccacctcgttcagcgataggtttaccggaaacgccggttctgccccttgatccctcacgcactcctcgaggtattcggctatttccagcagtcggtctccgatgtcgatctcccgggcagccctacggaggacccttttgaccacctttccggcttcctggaactcatcgtccacgtccggtcccccgggggagacgctccgtggaaacggttagaatatccgtgctggacgtagtgcgacgcatcgcggacgtcgcggccctaagcgttttcgaggtgatcagggacggccccctcgacgtactcggatgcacggtgttcaacatcgagctcgcgcgacgactagtaaacaaaggcttggacgtccggctggtctcttcagaagtgggcggtccgaagggcttgcccgtggtcgaggagcccgcgtccgatacgctgctggtgacagaaccgctgacgttttactccgaataccacctgcttcggtctcacgctctcgttctcatgttcaggtacgggaaccctggattcaaagagtgcttgcggggtctggattgtacgatgttgctacccgagatcgaggggcgacctctaccggatcttcacacggcgttcgtggcggtgcttcaggaggctgtgacatctgcctctgagggacatcacgtcgtagggctccgcgtctccgacacttcggattacttcatacctaactcagatccggcggaggtgaagcgacgcgatgacgcgatcgtggtgagggccatacctccctaccggctgagggaaggtagggtttgggaagccgtagctcgggcggtcgatcaggtacgattcaggagggtgtcccggtgcttccaaaagtaggcacccacccctccgagacaaaccgcggggaccaacagatggaaaagatcgcccagcagatcccgcccggcgagacatgctaagaataccacggcgagtgctaaaccatccccttccccgggacatatcacgtgagttgcggctaggaacacggcggctacgatgcacacccacgcggggtaagagtacgccgcgggtgctagggataccaaaaacacgacacgtagccaccgtttactacggaggttcaacgggaacttcttcacccctcctcttcagctcctcgaagagttcttccaacagcttccccagccgctgtcccaaaccctccgccttcggtagctccgagctgatagccctggcgataacgtacgctagcaggaatacggcacacttatgttgtagtttcgttttatgtagatggcccggtttcacattgaactcatcgtatagctttacgtcgtcctccctagttttcccctccatctttagatactccaaaacatagtaaagaaccgagtggaggaggaagagttcgtcctttttcatcgggggtgcaccccgttaaatgtaccctcgtttatcctcttggtggtagtatgaatcggtcgtatcgccctgaataacgcgctgttgcgcggccggtgaggagagcgagcatgtagctacatctcgtctcaggccttcctcgagtgagccgtactcctctatgatctgatcttcgacgggtttcgccttcttgatggcggcccgaacgtgcttgggttcaatgtacttcgcgccctccatcaccgcgaggtctcccgccaacctcacgaccccagacaggtcacggagccgcagagtgagggcgtctctctcaccatctatcactctggcgcgtcgtcgcgcctccttcacgatctcttcgacggcctctcgggtggcgtgtgggatccgtccatcccgctccacttcttgggcgacgaactgtgccaacttggcccggttctcttcggtatccggcatcgtggttttcattaggacttcgtatccttcaccttggatacgcgatcgtagcggtgataagatcattggaaggtcctggatgttgcacgcccctacgaggatgaaatcgcacgggacgccctccacgcgtaccgccgcgcctgatgactgcgggttcttaccggtgatcgggtactccttttcctgcatcgccgtgagcaggtgttgctgaaggggacccaactgtgcgagttcgtcgatgaacaggacgccttcatgggcctcgtgtacggcccccgggatcacgcgcttgtacgggggctcacccagctgctcgtcgcctccccagggacagtgtttcacgtcgcccaacagctccgtttcgctcgcacccgtagcttggacgaacggtttcctatcgagaggcaccagtactttcttctcctctccctcggagtcgggcttgacgacccggattctgtcgcccacgcgttcgtaaatcaccgccacttggcggctcgtagctcggtcgtattgggtggcccggtaggtacgagcggaatacttctgcgctccacacctaggacagtatcgacagtccggatcgctgtactccccacaactcgggcatcggaatccgagctgttcagcgaccggctcagggacctcctcgggcgacagtagtgtgtccgagtcttccttctcgacctcgtctcgcgtgcggaccttcacgatgggacgttccgggttggcggggttgtgatacacctcgatctgctcacggggtttgggcagcagttcggcaattccctgagcgatcatgcttttaccaacgcccggcggaccgacgaggaggagatgcctacgctgctttgcggcgagcttggcgtactccacggcgtggtcttggcctatcaccatgtccagtgggttgtcaggaatcttgatgtcggccgtcgtctcgatatcgtccagggtgaagtccttcttcacgggatcgataagatctttttcatcacgctcattctcggaactcttcttatctttgctagagtcttttttccgaagcaatttatctagcaagcccgaggaaagcacgttgtgcggcatatgaaaccacctcagactcgggattaggctagggctaagacatcgtgatgatcttaacatctttcttgatctcgggatcgagatctccttctttcacgcccactacgtacttcacacccttctcgcgggctgcttcgacgagtcgacgcgtgatcacaccgtctaggactacagctcgtacgccgtcctcggatttcagcttctcgaccaactcatcgagttccacttctttaactggctttaaaccctcgtcgaggaactccgcgcggaacgtgcccttgaggcgcttcaacctgtcaagcaagcggcgctcttgagggccacgtttcggtcgcgccttcttcttacgtgggcggccccgtctctcgggtcttttcttgggtttgggcttcttgcctttctccctctccttatccttgggacgttcaccgatctcctttaggtactcctctaccgggaccttcctctcgagcgcccgtttgatctcctttctggtcagctcctccacttccttgccttttggcgccttcgcgacgtagtccacgtcggccacttggagcagttcctttagaatcagctcgccgccgcgatccccgtcaacgaacgccgtcacggtcttctccttggagagttctacgatcgcctccggtacgttggtgccctccacagcgatcacgtttttgatcccgcaccggagcaagttcgcgacgtccgcccgtccctccaccactatgatcgcgtccgaatcctccacgttcggtccggccggtaggcccttgtactcctcgacctcgacgtcctccacggcctctttcaccttctgcacgagttcactgctgtccggtgtcacttcgctcaccatttcacgcagaatctcgcgagctctgcggatcatccgctcccgcttctctttccggatatcgtctatcgacaccacctccacttcggcccgacacgggccgattctgtcgacttgctccaacgcagcggctaccagggcggtctccacacgatccaggctcgacgggactatgatctcacctacggtttttccgttctcgttccgcagcttgacgtcaatacggcctatacggcccgtttttaacagccgacgcaggtcgaggtcgtcgcctaatagcccctccgtctggccgaagatggcgcccacgacgtccggacgttccacgtaaccgttagcacgtagtttggcccggatgacgtatttgacggccccattaccgtaatcggtgcgccctttcgacaatactatccctccctcgcacgaccatgaggagtgaaggatgagcgcgaactcggtttcccagcaccccctcgtcgttcggggaataataaggttgcttcaagccggggcggaaagggcgttatagtggcggggagttgagcacgccgagtgcgctgtccgtggcgtccatggaggcctccggatcctcctccaactcggtcatcgcgcggatagcgtccacgttctcgggtacgacgtcggcctcctggtgcacggcctgcatgtagtagagcacgccgtcctccacgttgatggactcttcccaaaccagtatctcgtacaggtcgtaccgcttcctaccgaggtcacgtcccaactcgattaactcggccgtggaaccgagcccctccccgtgcggtaccacccatatccttctcgcctcctcgaacgcgtcgatgacgtcgtccgacgtgacctcttccttcagctccaccctgacaacgtgcatgtgcatgagcgtcgtcggcaccttcacggccgctgtcgtaatgtcgatgtccggcatcacggtcttaacatccggtccgtggtgggacggcaccgtcaccgggttcggcgcgatggcgttgataggtcccttcttcacctggtgcgggtcggccgcccgacgtacgatcgtcacgtagacacgcccgagctcgaactcctccttcagcgtccctagcgtgcggcacagggccgtggtgttgcacgacacacaccggacgtagtcagcccccagggcctcctcgtagttacattgggcgacgaacgacacctcggcgacttccgcctcctcgccaccttggaagatcgccttaaccccggctttctcgtatagcgtctctttgttccgggctccgatgccttcgggggtgcagtccacgacgacgtccaacccgtagtcctcggcgttcagcaccacgtcttccacggtaccctcggtctcgattcctgcatcttcgaacctctcaacgcggtcttccggcacgaacagcgggtaaccgtactcctcgacggccaaccgggccaggtaatccggcgacgttttgaccactccgagtacttccatgtcacgctgagcgtcgacggcatcggcgactctcttaccgatggttccgtacccgttgatcaacacgctaacgtcggccaagacccgcctcccccgcgcgctgcccgtaactcggagcttaaattagcgccgttcggatcccgcgtgatggataataaggcggtggaaatgtacctcccgcgattaacactccccggtcaccggtcaccggactggctcatcccttgtccggggaggaccctcgcgcgggaggctatccccgcctgtcccgcgtcggggttgaccgtccggtcatccccggtcctcacgaccgtgtcccggagggaccgtgcgacgcgggtgtaccccgggtctcgaccccgggcttcacggcctagggtatcctccccgctccacccgggtcggcggggccccggggcggggacggcgggggattccaccggaaagaacgtgacttgtgggtgaccttgaaggttaccccggttgcttcccctacgtgtgtgagattggtatatggtgggggtagagcgcgcgatcgtagtcccacggtcggatcgcgagtttcggaaacgccgtggtttctgtgtttccctcgagggtctcacgccggcacgtcgatcttagttgggtccggaacttccaggcccagctcctcggccagctccttgtaccgattcctgatcgtgacttcggtaactcccgagatcttcgcaacctcgggctgtgtccgacggcacgttcggagcttctcgttgagctcacgttcgagcttctccttctcttcctccgactcggcctccttcatcttctcgcggtactcctctatgtactccttagccttgaggagcccggccaggtacagggccgcgcccgccagtccggccgggttgcggctcacggtcaggcccttcttctcggctttctccaggatctcacgggctagcatttcgacatcttcagagacacccagctcggtcgcgaatcgggacaggtactgcttcggatccggagcgggcatacgctcgttcaggtgccggagtaggacccgatgcgttcggttgatgtctttgggcgtgatcccgaacagtttcgcaatctccttgatagtacgggggtgcttacgcttcttacacgccatgaacagtgcggccgcggccgtgttctcgatcgacctacctcggactagatccttctccacggccttccgataaatccggatcgcttcatccacgatggaccgggggatgttagcctgcgagcataccctctcaataagttctacggcggatcggatgttcctgctgaccgggtcgttcgaaatccacctatcccacctcttcagacgcctgaaccgccagtccacgagacgccgaccgcgagtgtcacggtcatcgatgatcgtgtcccctaacttgtgcggatgacgctccgagatgggtgcacccgtacgctcacgctgcgcgcgctgatccgcgttgaaggccctccactcgggcccgtagtcgatcagatagtcgacgacggtgccgcagtcccgacagaccagttccccgtgcttctcgtcacgctctaggttcgtgctgccacacttcgggcacacccgatgctccgactcggtgtagaccatggcggcctcacccccttacgccgggaaacggcccggttggcttttcgggaaagattttaaatagattactccccgctgcgcgggcacagtcccaccgcgagcacggccaacgagcagaccagggccagccggtacgttagcggcgtgtccagtcccaacagcttcactatcacggtcaccgcgacgatagcgccgacggagtgtgcggtcgccttgacccagcgttcgtcgatctcactctcgccggacttgagcgcgggcagacccttgcgcaccaccacgtagcaggccaaccccaatatcacggcctccacgatcggcgccgccaggtactcctcgatcatcgtcccggtcatgacagctcccccttcacgacctcgacgaaccgatcgtaaccgaaccgctccgcgtcctccgtcagaagattgaagcgcaaggttctatccacacgctcgtaacccagggcggttatggtcataatcccgtaccgtcgcagcaacccgagccctatctccacctcccgttccaccccgtggaacaccagacccgcacccgtccgttccacgtcgagctcgtccttgagccgctcgtacacgcgttcaagttcctttaaccgagcttccagtgagctcaactcgaactcttcaaaggccctttttacggccgcgagcgtcggtccatcgaccgtccaaccgtatccttcgcagacccgccgcacgccctccacgaggtcgtcccgtccgatcagcacgccggcgcgtggcccgtccatcagcttgtcgcagctcgttaccactaggtcgaacccgtacctcggacccggcttttggccgtgcaatcgacgtactcggtcgcccgaagcgtcgtccagcagcgtcacggcctccgcggaggcgacctccctcagagtgtcctcgcttaccacgttccaacgcacgtcgcaacccgttacgaccacgagatcgaacccgtcgagatcgggtatctccgactcctcgacctcctcgtactccgcccccgccaacctgcagccttcctccacgcatgggtgggcttcaccgtcctcgggtagtacgtgcaacacactcctcggctcgagggccaggatcgtcgcgataacggccgccgtcgtcctaggggccaccagtacctcgtactccggagcgtcgaagtgctcccgacagagctcccggatctccggcaaaatcagcgcttccgacagataggtacggagctcgtccgaggcagcgtcgaccttcggtcgcgacgccaacccggtgaagtcgtagagtgggtcgccccgcgagatcctctccctgattatctccaacgctcgatccctaaccttcatcgaccgaacacccgccgcaggctggcttccaatatctcgcaccgattcgaccctaccgcaccgcagtacccacaacctggacactcccgacggaaacctcgagccgcctcctccgggggaacctcccgccaccgcccgagaacgcgctctccccaccgtagcgactcctcgctggcgaccttccggatctcgccctcgggacgtaaccacctccaaacgtgataccggagccaatcgcgcggcaacccgtgcctctcgcggtatcgctcgagcgtttccatccacccctcccaaagttcgggatgtacgcgctccgatagcctgaagtccccgactttgctcgccgggcacatgtaacaccctattctgtcgaacccctcatcgtaaagcgggttgtacggtaaatccttggagtgcacgcacaaccagacgtccagggacgaccaatcgaagataggggccacgttcacctgtcccggcaccgcgtcgctgtcccacaccctaccccgctcggatcgggcctcggactcgtaccttcggacgcccaccagcgtgtaacaccctcggccgaactcggagcgaacgtacctcgtaacaggggtgagcttcgcggccagcgtgcaccacctgttatctcgagaaggaggtagtagagcttccgtcacccggtggaatatctccgggtccccttcgactatttccacgtcgatacccacggcctcggcggcccggtccgctgcctccacggtctccggcaactccatacccgtgtccacgaagagcgcgcgctccacccccgcctccgcggccaccactaaggtgaccagactgtccttgccgcccgagaaggaggcgaaggtccgggacgggctcacgttctcccgggcgaacgtcaccgcctcctccagccgttccgaaacgtactcctcgtgcgcccgcgccacgtcctcgaagtccctgccgcggaagtacgttggagacccctctacggcacctctcacctccacggccagtccgcggttccggcggaccatttcgtcccccgacatcctggcccgaccgaaggccaccgggcgacccccgtgttcgatcaccacccactcaccgggctcgacgtcgtccgcggacgtcacgcccggcgcgaacaggttcttcccctccctcaccgcctccgcggccccacggtccacctcgatcgatttcccgcccaactcgtggagacgccgcgccccctccggcttgagcacgatcgtccaacggtccttccgtaagtcgtaccgcagcgccagtaccggctcggcggcgacgatctcgtccaggtaatcgagatcaggcgcacgattcgcgaggagcagctcgtcgtcacgcacgagatcggccggtaatccctcctccaccaaaacctcacggatgaactccaagtagccggggcctaccggtcggagctccgccggaggggtcacgcgtagcgggtccgtaccttcaccacactccggacaccgacgcagcggcgtgacgagctcgcactcctggcacacgtaggcgggggccttacccgggagcttctccatcccagtacccccggtagacctccgcgaacccctccacgcccagccggttgaccgccgcctcggtcgcgcgcagggcccgctcgatcctcccgcgccacgtgccctccaggcgctcggcggccgcgagctccgcccgcagtcgatccaaggtcacttccagtcgtccgggatcggtggacccctccacggggcgccggagcgtcctcttcagactcaggacttcgcggacctcctcgacccgcagcttcaccccttcccgttcgagctcctcgaccacccgatccgcccgctcggggctcatgggaactccttcgcggtccagccgcgccgagaccctgcccacgaccttgtgcgcctcccggaacgtcagtcccgcccgctccgccacgagctccgccaggtcgacggcggccgcgtgcgatcccaggacggtaccccgggccgcctcctcgtccacgtccagtccctcgaccaccttacggagcacccgcacgcacagctcgaaccggttcaccgagtcccatagcaggccgttcaacacctggaggtcccggttgtagaacatcggaagcttaccgtggacggcgtccccgagccccttcagtcccgcgactacggtcagctcggcccggacgagctccagcgcgtccgggttcttcttgtgcggcatcaccgagctcgtcgacgacagctcgtccgggggctccaccaccccgagctcgtcggagcacagctgtatcaggtccccggccaacctggtcagctccgaggccgcggtggccagtctcccgaggaactccaggatcggtcccctcaacgccgtggcctcaccgcagtgccgcgccggtttccggaagcccagcaacgcggcctcccggtgcctgtccacaggaaccgtcgatcccgggaacgcggagcaccccagcgggcactcgtccatccccgggaccctgagcaacccccgggcggaacgcgcgaccgccgccgcgtaggtggacatccagaacccgatcgtgcacggctgcgcccgcttcaggtgcgtgtacccggcgatcggtacctcggcgtgctcccgggccaggtccagcagcgccctcccgagcccgaccagctcgcgcgacaggtccagcgcgcgctccctcagccgcatccgcacgctcgtcgccacctggtcgttcctgctcctgccgagctgcagccatccggcttcctcgccgaccacttcgtgtagcctcgactctatggcctcgtggacgtcctcggcgtcctcgggcagccggtcgggaccttcctcgagaaccgttacgagaccctcaacgattcccgccgcggttgagcgatctatcctcccggcctcccacagtgacaccgcgtggaccaccgagttccacacgtcgcagtggaagatctcccggtcctgctccagcgacgatgacaattccgcgaagtccgggtcgcggccgccggagacgcgaccgccccggtaggacggtctccccagtgccaatctcgtcacacccacagggtcggtgggggtaactccggtcatcccggggggatgggcacatacgtcgcggctgacgtgcacgtcgttcccctacggttaaaaggtaaccggtcaggctgcgccgcgtagccgtgagcggggggaaacgacactgatattcccgatggcactcctcctcacgctgatcctcgcattgggcttcacaagtctcccgctcaacgccccacctcatctcagcgcggacgtgcccgacacgtacccctgggtcggtgtgtacccaccggacgtggaggtcacgtacgtcaacaactgggacccgaacctcaacccggaacacatcgaggactggaagtgcatcgccagggaaatcctcggtgacccgaagtcctggtgggagcagtacaccgccggcacaccgctggacgagctcgtctacgaggccgccaagaagatagagtactgggtgtcaccctacgacgacgtcgacccgcacggcatcaagtaccggtactactacaacacgagatacggcgcctggaagacactgcagctcggtcgtggtaactgctgcgaccacgcccacgtcatggtcgccctgtgcagggcgtccggcatcgccatcaggtaccgtcacgaggtcacccggttcccgtgctggggcacgtgcgaccacgtctgcgtcgaggtgggactgcccgagaacgtcgtcgacggtaagtcccaggacgtgaagtgggtccgcatggaccccaccaaccccaactcgcagtgcgtccggctgaaggccacgtacccgaacctccccttctaacccacacccgttgaaccgaaacggcgataaacccgggtgacccatcaccgggcccgcgagagcgggtcggcgtgggcgatgtagttgacgttcgtcacaccacgggtctccccgacggagtcggacatcgaggtcgggtcgtggaaggagatcgaggagatcgtatcctccctgagctccggactagttcgtatcaccacccgcgatcacgaggacatctacgactgtttcttcatcgtcgaaggaggcgccgtggtaggggcctacctgggacgtatccgcgccgaggagctctcggccgaagaggccgttcgggccatccgcgacgtggtggattccgtcggcttcgcgctcctcgacgtgtacgagctcgagccggagctcctggagctaatcaaacgcgtgaacgacgagtgcctgctcaaagaacccttcacacctaccgaggtcgaggaagccgcacccgaggttgaggagcccgagcgggatgagctcctggagaagttgggtgtcgatctcgacgcgatctacgaatccgtggaggccgtgctcgaggactacttcgaggaggaggatcccttcgaggagttcaagcgcatgctccgggccctcgggacccaggacgcccgcgtgtacctgcgcgtgaaggtacccgaaggtgtcgatgagaggatgctcgaggaagtccgacgcgacctcgaacacgccctgtccgagttctcgatcgacggcgtcgagatcaccccatcacttaaggagaaggagacggtcaccctccgcatccgcgacatcatgaaacgcatccggggcggatagcccttggtgagcgtgaacgagaacgccctgcccctggtggagcggatgatcgagcgcgccgagctcctgaacgtcgaggtccaggagctcgagaacggaaccaccgtgatcgactgcggtgtcgaggccgccggagggttcgaggccggtctcctcttctccgaagtgtgcatgggcggcctggccaccgtcgagctgacggagttcgagcacgatggtctgtgcctgcccgccgtgcaggtgaccacggaccacccggcggtgtccacgctcgccgcccagaaggcagggtggcaggtccaggtaggcgactacttcgccatgggctccggacccgcccgagccctggcgctcaagccgaaggagacctacgaggagatcgactacgaggacgacgccgacgtcgccatcctgtgcctggagtcctccgagctgccggatgaggacgtcgccgagcacgtggcggacgagtgtggagtggaccccgagaacctctacctcctcgtggctccgaccgcgtcgatcgtgggttccgtccaggtgtccgcccgcgtggtcgagacgggactgtacaagctcctcgaggtcctcgagtacgacgtgacccgcgtgaagtacgcgaccggaacggcgcccatcgcgcccgtcgccgatgacgacggtgaggccatgggacgtactaacgactgcatcctctacggtggaaccgtgtacctgtacgtcgagggtgacgacgagctaccggaggtcgtcgaggagctcccctccgaggccagcgaggactacgggaagcccttcatgaagatcttcgaggaggcggactacgacttctacaagatcgaccccggcgtgttcgcacccgcgcgggtggtcgtcaacgacctgtcaaccggcaagacgtacacggcgggcgagatcaacgtggacgtgctgaaggagtcgttcggcctctaattccctccccaccgtccctaacgttacgtggtccattacgtaaacgttatagtcgagtaccgtcgggaacggcacaggcgcgggcccgcagttcagcccggcagaacgccggccttacgagccggtggtcccgggttcaaatcccggcgggcccaccaccactaattgtcacgtgtctcacaacgttttccaagagtgtggagggccggatctcgccttagcccctctttcaggggtgagaaaatttaatatatgaccccccccgcacgggggagtggccgcggaggatgggaccccgggtaacccctggggggaagacccccaggggcccggggtcgacacaagccccccgacgccgaccccgggcgggggccaaccggccccgccgggtcggctaagccgtcgggtggatgccttggctcgggcgccgaggaaggccgtggcaagctgcgataagcccgggcgaggcgcatgcagccgtggaacccgggatcgccgaatgggacctctcgccggggccgaaaggtcccggcactccggggggaaaccccgggccctcgtggcccgggggagtacccccggagggggaacccgccgaactgaaacatcttagtaggcggaggaaaagaaagcaacacgcgatgccgtgagtaggggcgaccgaaaacggcagagggcaaactgaacacccgcccgaaagggcgggtggatgtggggttgcaggcccgggccgcctatgtggccgtctcccccggaacggccgaagtgccctggaacgggccgccggagagggtgacagccccgtaggccgccgggggacggccgctggcccgggcctgagtaccgtcggttggatatccggcgggaatctgggggacatcggcccccaaccctaaatacgtcccgagtccgatagcgaacaagtaccgtgagggaaaggtgaaaagaaccccggaaggggagtgaaaagagcctgaaacccgacggcgatagtctgccggggcccgcaagggatgaagccccccgaaggaaaccccggtgacgggggagtacgaggggggccgaccggggtcccggcgttcgttttgaaacacgaggcggggagtccgcggccgcggcgagtctaaggggttcaaaccccgaaggcgtagggaaaccgacacgcccgcagcccggccgttaggccgggccaggggcggggtcctaatagggcccgcagccgcggccgcgggacccgaaaccggccgatctagcccggggcagggtgaagcggccctaaagggccgtggaggcccgctaggggtgctgtagtgcaaaacgctcccgtgaccccgggctaggggtgaaaggccaatcgaggccggagacagctggttccccccgaaacggcccgcaggtcggcccggccggaggtaggtggcggggtagagcactgattccccggttaggggccgagaggccccgccggggagtcaaactccgaacccgccaccgccgtagaaggccggagttggggccggcgggtaagccgccggtctgagaggggaataacccagaccggggttaaggccccaaagtgccggctaagtgttaaatagaaagggagtccccggccgaagacagcggggaggtaggcttagaagcagccatcctttaaagagtgcgtaacagctcacccgtcgaggtcgggggccccgaaaatggacggggctgaagccggccgccgagaccccggggccgcgggccgatggcccgcgggccggtaggggggcgccccggcggctcagaagccgggccgtgaggtccggtggagccgtcggggacgagaatcccgccggtagtagcagcaaagcggggtgagaatccccgccgccggaggggccagggttcctcggcaatgttcgtcagccgagggtaagtcggccctaaggccggcggtaacaccgaccggccgaaagggaaacgggttaatattcccgtaccgcgggggtacgcccggcaacgggaagcccggcggccgacgcctcggggtaggccgggcggggctgtcgccccgtccaaccggtgaaggccggggagtcccgtaatggggagaaccggccgaagccgggaagggccgcccgttatgggcggtccggccgatccccggggcccgtgaaaaggccgccgggaaggatcccccgcgaccgtaccgagaaccgacacaggtgcccctgggtgagaagcctaaggcgcggcggggtaacccggccgagggaaatcggcaaattggccccgtaacttcgggagaaggggtgcccgcggccctgaccccgagggtcgaacctcgggggaggggccgcgggtcgcagtgactagggggggccgactgtttaataaaaacataggtcccggctagcccgaaagggctggtaccggggccgacgcctgcccagtgccggtacgtgaagcccgggtacaaccgggtgaagcgccggtaaacggcgggggtaactataaccctcttaaggtagcgaaatgccttgccggttaagtaccggcttgcatgaatggcgtaacgagccccccactgtccccggccgggacccggtgaacccgccatccccgtgcagaggcgggggacccccggcgggaagcgaagaccccgtggagctttaccgcagcctgccgttggggcacggctgcgggtgtatagcgtaggtgggagccgttactcaggggcggccgccaggccgtccccgaggcgcccatggaacaccaccctcccgcggctgtgcccctaacccgggccgagaaggcccggggacagcggttggtgggcggtttggctggggcggcacgcccccgagaaggcatcgggggcgcccaaaggtcggctcaggcgggtcagaaatccgccgtagagtgcaagggcaaaagccggcctgactgggtcccgcacaataagggacccaggcgggaaaccgtggcctagcgaaccccggtgccgccccggtggcggcccgggatgacagaaaagctaccccggggataacagggtggtcgcgggcaagagcccacatcgaccccgcggcttgctacctcgatgtcggctctccccatcctggcggtgcagcagccgccaagggtggggttgttcgcccattaaaggggaacgtgagctgggtttagaccgtcgtgagacaggtcggtcgctatctgccgggggtgttggccgcctgaggggaaggaccgcctagtacgagaggaacggcggtccgcggcctctggtggaccggctgtccggcagggcaagccgggtagctacgccgtatccgataagggctgaaagcatccaggcccgaagcggtccccgaaaataggcggccgttgaggcctcgggtaaaagacccggttgatggggcgggggtgtaaggcccaaggggccgttgggccccgagggcctgagcccaccgctcccaatcggccgatggacccggcggggccgggccaaacccgtccggggtcggctggcctaagaaggcgctagtccaaggaggctctcggagatcggcttgtggagtcctcggtcgctgtggtccggatggtcagtcgcctcggtatcgaatgcttaggccggtcgcgtgaatcgttatgaatttcgtaacattatttttccagatatcgagttaactgttcagtccgaaactaatgttttcctattttccagacagatgtgttggaaatgtgaacacatataacttatgaattcggacatgattgcggttcccacctaaacgagttccccagagacccgggggaatcacccatggctctttggctggatgtccccgtagctccgaccgattcgttctaccggaagttgttcgaggccgtgtggcgaatccttggggaccgggcccgtgggatagcttcggagcggcttccagccctccgtcgctgctacacggtgtcgcccgactccagcacgttcctctccgagaacgtgcccggcgttcgactgttagacgagttcaggcccggtgagctcctggaggagatcctttcggagactgtatcgggtgagctcggccgccggttctggggctcgctggtggtcagcgtggtagagcggggtgacgtcgccggtctggaagctatgaagaggtcgatcgaggccctgagggcggtcgacgtgacgccctggttggacgcgctcgcgctggacgtgctggtggccctggcggaggacgtcggtgaggacatcctcggggattcgctccagctggtcgccgagagactcgacgtcgacgaggacggggtgcttcgtgtctctccgttagcgttggagttcgcggggtactgcttcgagatgatcctgctgggctacgtggtggcgtatcggaagcccgaggaaatcgaggtggtttcctgtgacgtcttcgcggtggaggacgtacgacgggatatcgagcggaggatctcggaggtcaagtccggggacctggagctggcggccgaggtgatcgaggaggtcttggcgccgtatctacgggtggtcaccgacgttaggggttacctggaggaggcccggtcgatggacccctccatcgcgctggaggtcgacgggttctcggtatcgatcgctcccaaggagctcgatccggagtgggacaggcacgtccaggaggcgatcgagaagctgacgggttcgggtggcaaagcccgaagggtttttaattgagccggggtcgccgatcactggacgcgcccgcgggggcgcccgagcctggtcaaaggggcgggaatgaggatcccgtggccgtagggccgtcccgggttcaaatcccggcccccgcaccaagcgggaatcgttatgggagtgataacgttcctccgacggcggctcggacccgggggtcccctccttgcggggttccccccgggcgtcatcccgccggcacgttcaggcgagcgggcccagttccttcgcccgctcgtgcatctccttgacggcggcgacgaacttgtcggcttccgcggaggacatgaagtatatctcgacgcgctccggctcgatgccgagctcctctagcagcttcttggccgcctgcacccggcgctcgcacttgagattaccgtcctcgtagctgcactctcccttctttcatccggcgacgaaaaccgtccacgcgcccttggcgagcgccgtcaggatgtgttcgatgccgacgcggcccgtgcacggtaccctcacgatcctgacgctgctggggtactgggcccttccggtacccgctaggtccgccgcaccgtagcctcactcgtaacagcagaaggccacgacgaccgactcctcggacatggtcatcacccgatcgtgcaccgctccgtccgttttaaatcggttaccatcccgaggggtcgatcggggagatccacgtgaagagggtcgagctggagggtatcccggaggttcgggggaccgtctgtccgcctccctcgaagagcgggtcccaccgggccctgatcgccgcctcgttatgcgacgggagtaccgagctctggaacgtgctggacgcggaagacgtgcgcgcgacgcttcgcctatgtcggatgctgggggcggaggtggacgtcgacggtgaggagcggctcgaggcgacggtctccgggttcggggattccccgcgtgcgcccgaggacgtcgtggactgcgggaactcggggactacgttaaggttggggtgcgggctggccgccctcgtcgagggcaccacaatcctgacgggggacgactccctcaggtcccgtcccgtcggggacctcctggcggcgctccgctccctgggtgtggacgcccgcggaagggtggtgcggggtgaggagtaccccccggtggtgatctcggggcgcccgctccgggaacgcgtcgcggtgtacggggacgtcagctcccagttcgtgagcgcgctcctctttctgggtgccgggctcggtgcgctccgcgtggacgtggtgggggacctgcgctctcgcccctacgtggacatgaccgtcgagacgctggagcggttcggggtctcggtggtacgggagggttcctcgttcgaggtggagggacggcctcgctcacccgggaagttgcgggtcgagaacgattggagttccgcggggtacttcgtcgcgctcggcgcgataggtggtgagatgagaatcgagggggtggacctcgactcctcgcacccggatcgcaggatcgtggagatcacgcgcgagatgggggccgaggtccgtaggatcgacggcggtatcgtcgtgcgttcgacgggtcgactggagggggtcgaggtggacctctccgactcgcccgacctggtcccgaccgtggcggcgatggcgtgcttcgcggagggggtcacgaggatcgagaacgtgggtcacctgcggtacaaagaggtggacaggcttcgggcgctcgcggcggagctacccaagttcggggtggaggtaagggaggggaaggattggctggagatcgtgggtggagagccggtcggggcacgggtcgattcccggggtgatcatcggatggcgatggcgctggcggtggtgggagccttcgcacggggtaaaacggtcgtcgagcgcgcggacgcggtgtccatctcctacccgaggttctgggaggatctggcgtcggtcggggtgccggtccactcagtgtaggttcgagtgtcggatctcgaaggcgcacgcgttcaccagctcgccggcgcggaccgcgcacttggcctccctcaccttatgcggctctcggccgaaagccgcgagagtctcgtggatgaaccccctggtagcgtcgcacacggactcgtagccgcgcgggaagccggcgcactccggacagggggccgcgaccacaacgtcctcgttcaggtcgtagctggtccccaacaccctttcgatgcacgttaggaactcccggatcgacagtacgtggtacacgcggaggagggcacgggcgtacgtcctaccagcccagaacagcgtggcgggcgcctcgaagtcgagagacctccggacgaggtaccacgtcgctatcctgagtgcggcggtctcttcgggctcgtacctcgtcgccgcgcgggctatctccgtcaacgcgtcctcgtccagccatctgaggtccggaacgacgagtttgggctcacgcctgacgacgaaggtgcagacttagtccccggccgccctgcatcgggtctcggccacggtgaccggacgaccgatctcgaggcggtaagcttcggtgatgaaccccctggtcaggtgacacaccggcccgtcgatcccacggagtcccgcgcattccgggcacttccggaccgtgacggtatccccttccacctcgacctccgccccgaagacctcggcgaacgcgcacaggaccgactccaggtcgtctccccctagaatcctgactagacgacgtcccgcctcgaagagggcggcggtcccggtctccctggcgacctcgatgagagcgatcctcgtgagccggtcgtaggtgaggagctcgtaaggcgcgaacgcttcggccgtcgcctcggcccctcggagcagggtttcttcggtgaggtccacctcggttctccggaaatcgtgttccggaatcctttacctgggtttcgcccgccccgatttttaagtgaccgacgcggcgccgtcgtgggggagtcccgtgaacacgctcggccgcctgttccgcgtcacgacctggggcgagtcccacggtccggcactgggcgcggtcgtggacgggtgtcccgcgggactaccgctttccgaggacgatgtgcagcgtgagctggatcggaggcgccccggacagtcgggggtctcgacaccgcgctcggagcgggaccgagtggagatactgtcgggcgtccacgagggacgcactctcgggactccgatcagtatgatcgtgtggaacgaggacgtggattcttcgaagtacgagccgatccgaacccggccgcgtccgggtcacgccgacgtcacgtaccggtggaagtacgggcacgtggattaccggggcggtgggagggcctcgggtcgcacgaccgtcggtatcgtgatgggtggcgcggtggccaagaagttgctccgtgaggcgccctcgaacgacccgctgggtatcgagatcgtgggtcacgtggtgagggtgggctccgtcgaggcggatcccggcgacctgtccgcggaggagatcatgcagtacgccgagtcgaacccggttagatgcgcggatcctgacgccgccgaggagatgctcggggagatcgagcgtgcgcgcgagaacggggactccgtcggcgggacgatcgaggtgatcgcggagaacgtgccacccggcctgggtgacccggtcttcgggcggctggacggggagctagcgggggcgttgatgaacatccccgcggtgaaggcggtggaggtggggtccggtgttcgatgctccgagatgcacggatccgagcacaacgacccgatctggtgggacggacatcccgtcgtggacggcgacaactcggggggagtactcgggggtatttcccacggcggtagactggtcgtccgggtgcacgtgaaacctactccgtccgtgtccgttccccagcgcaccgtcgacctagagtccgaagaggaagtggagatcgaggtggagggacgacacgacccctgcatatgcccgagggctgtacccgtggcggaatccgttgtggcgatcgtgctggccgacgccgttctcagggccgggtacgtgaacccggacagtgtcgagctcccggccgcgtccgtggaggatcgatggaggacgctgaaacgacacctatagccccctgagctcgaaccggaactcgcaccggccgacgagctcaccggtcacggccgcacactcggtttcctccacgcgttcgacctccttgccgaaggtacccagggtctcgtggagcgcgcccctgacgccgtggcatacgggttcatgctccctcgggaacccggcgcactccgggcacggttcgatcgacattcggttcccctcgcccaggtgacactcggctcccgtgacgtcctccactatcgacaggaacgacgtcatctccagcgggttgtagaggcggagtaaggccctcgcatacagccttcccgcccggaaaaagatcggggcggcggcgtccgcggggtggaacttgagcgtgtactccgacgcgagtttgaaggccgccacctcctccggctcgcgctccgatgccgcgtgagccatcctccggagtgccctctcgtccagcccgtcgagccgcggaaccgtcggctccctgggtttcctcccgatccggaactcgcagacgtcatcaccggcggcgcggcatcggacctcctctaccggcgtcctttcccccgtctcgagctcatgggcgccagcgatcaggcctctcatgaagtgacaaaccggcccgcgggctcccgggtaaccggcgcactccgggtagttcctcacggtcaccacgtcctcatccgcgtccacctcgcaccccgtgaggtccgcgaacgtcgtcagcgtcgactccaggtcgtcaccgagctcccgcgccagcaggcaccccgcttcccggttacttccatcagcgccaacatgacgagccggttcgtcacggccagaccgctgggtcggatcgtctccgtggccgattccgcaccccggcatagctccttcgtcagcaactccgaccacccggaaataggtttccggttaggatttaacaggatcgggcccgccgggaaagcccacagacctgggcgcggtgtgaacggggtgtagatcttggagaagctcgtcctgctaccgggtccggtgatggtgcacgaggacgtcctcctcagatcggcgaaacaggtcatgaaccaccgtagcgaggagttcgaggagatactcacggagtgcgtggagctgtccaagtacctgtttcagacggacggcaacgtcgccatcatcaccggttcgggcaccgcggccatggaggcggcgatctacagcctcctcgagcccggtgaggaggtcgtcgcggtggtcaacgggaagttcggcgagcggttcgcggacatcgccgagcgtcggggcgccgaggtgcgccgggtggagttcgagtggggcaaggtcgcggaccccgagcgcgtggaggaagccctcgcggactcggacgcggaggtcgtcacgctcgtccacaacgagacttcgacgaccgtgctcaacccggccgaggagatcgctaggatctgccgtgagtacgacgcgctgttcgtcgtggacgcgatatcgtcgttgggtggcgtcgagttcaggatggatgactggggcgtcgacgtctgcgtcaccggttcgcagaaggtcctgggctgtccgccgggtctcgcactcgtggccgtcaacgacagggccttggaggtcatggaggagaaggacgcgggtagctactacctggacattcccaagtacctcgaatacctcgagaaggatccgaagcagacgccgtacacgcccgccgtgaacgccttctacgccctgcacgaggcactgaagaggctgaaggaggaaggactcgaggcccgctgggagcgctaccgtctcatgcaacggatcgtccgcgaggggatccgggcactcgggctcgagttgttcgtcgaggacgacgagatagcctcgccgaccgtgaccggagtcacctaccccgagggcgtggacgaccgtgagttcaggggtgagatcctgcgggaccgctacgacgtggtggtcgccggcggtcaggaccacctagcgggtgagatcttccggatcggacacatgggtgaggtccggatccgcgatatgatcacggcggtgacctgcatcggtctcggtatgcgcgagctcggcgtcgacgtggacgtcggtgccgccgccgaggctatggccgacgtgctgtcagaggtatcgtaacggccaccgctcggtgccggtgccctcctccagcgccctcacaccgtctatcacgttcccgttcaacacgatcgctaccgagaatatcaccgtccccgggagtacctcggccggcgcgccccgacgtacgggtcgcgctcccgcaccccttccggcccctaagatggccccggccgtcggccccacctgatccaaccgctcggttgtggctatcaggacggggtcgtccgtctccggcccaacgtagcccacgcccgggatctccatgggctcctgaacgggtcccccgccgacgtcgtaacacagaccctccgcggccctccgacacacctccgcgacctcggccacgcggttctccgccgcgtacgtgtcgaacagcgtcacgaccacgtcctggtactcggactccgggcaggccgcctcggcgtaggacggcccctcgcccgcgccctccggagactccgaaacccccataacgtcctcgccaccatactccctgaagaggtcgaagacggcggcgttcacgtcctccagtgccccctcttcgacgacgtacactaccgcgagatcgtccccgcacaccggccccaggaccacgtacatcagctcgtcccggaacccccgccgtagttccttcagatcgcgctccacgcgccgcagtagtcctcgggacacgcgcacgtcgtcctcggaaaggtctgcggagaacgcgacagcccggagccccacgcacagcaccccccgggggaggcgcctcattggttaccgtgctcgaggaggaggatccccacgcggttaaacacgtcgtccgcgccctccgtgcggggaaactcgtcgccatcccgtgcgacactgtctactccctgagctgtgacgctacgaactccgaggccgttcgccgtctctacgccgcgaaggagcgtcccaaggataagcccgtcagcgtcgccgtccactcgcccgagaaggccctggaactcctggagcccgtacctagactcgaggcggccttggagacgctgaccccgggtccggtcaccatcgtcgccccccgaagacccggtgtggtcgcgcccgaggtcgcggccggtaggcgcaccctgggggtcaggatcccggatcatccgttcttcctgcgcgtagttcggaggttcgggaaaccgatcgtcaccacgtccgctaacgtctccggtcggcccgccccgaccgatcccgacgaagtcttcgagcagctcggcgaccgcctggacatcctggtcgagggtgagtgccgcttcggcgaaccgtccaccgtgatcgaactcacgcccgaaggtaacatcgacatactccgggagggcgccatgccgaaggaggaaatactggaaacactaagggggacgacctcaggtgcctgagaagggcctcaaacccttcctcaccggcttccgcgagaccgtcctcgatctgaccgacggtgagggcgtcctcgtgtactccggatgcgccggcacgtgcacgccgttcgcggaactcctcgcgttcacgctgcgggggaccgacctcgagcagtactactcgatagacctccgccgcgagtacctgcggatggagctgcgcgaccacggctacacggtcaccgacgagcgcgaggagctcgagagcgcggacgtcgtcgtcctcctcggcggtctcgccatgccgatatccgacgccacacccgacgacgcccgggagttcctcgaggagctcgggaacccacccctcgtcggcgtatgcttcatgaacatgttcgagcgcgccggctggaccgacgagctcgacttccacacaatcatcgacggctacctggaggtcacggtcaagtgatcgagaaagaaccggtacccctgcaggtcggcgactaccgtctgtacttccgcctctgggccctcggcgacgcggacgccatctcggacgtgctgtacagggaattatatccccacgagtggctcgaggggtcccgcgaggtcgtcgacgtgggtgcccacgtgggcgccttcacggtcctcgcggccgcccacggtgcccgcgagatcctcgcgatcgaaccccaccccgacaacgccgagctcctccggcgcaacgtcgaggagaacgacctgaacgccgaggtcgtcgaagccgccgcctacgaccgcgaggacgtcgtcaagatgtacctcagcccctccaccgtcgcccactccgtcgagctcgtccgctcccgggagaccatcgacgtcgagaccgtcgccctcgacgacctggggacctcgcccgatctgatcaagatcgacgccgaaggggccgaggagcgcgtcctccgcggggccgagcggaccctcgaggaacacgcccccgtcctcctgatctccgcctaccactatccagggcaggaggaggacctccgacgatggctcgaggacaggaactaccgggtcgaggtgctcgtccgggagacgagcccgtacaggagccccgccctacgcgtaccggtgatagtggccgaaccccgcgcctgatcgtcctccacgcccgcgactgcgacccgaaagcctgcacggccctacgggcccatcgtatgggtctcgtcgagctcactaggcatcccggggacgtgcccaccggtgccgtcgtcctggacccgaccgtggagaaggccctctcccgcgaggatcgcgatgccgccctggagcgcggactggtcgccgtggactgctcctgggagcacgtccaccggtacttcgggccgctcagacgacgctgccggcacaggatcctcccctacctgatcgcggctaaccccgtcaactacggcaaaccctgcaagctgagcaccgtggaggcgctcgccgccgccctgtacatcctcgggttcaggcgggaggccgaggagttcatttcgcggttcaagtggggtcccgccttcctggagctcaaccgcgaacggctcgaagcgtaccggcgggccgagacgagtgccgaggtcgtgcgcgtgcaggaagagttccttccagacggtctgtgatcagccgtccgtgaatcgttatgtaactcgtaacgataggtgagaagaaaggagagggggattagcggcgccggaggaccgccagcgccgccagcagcccggccagtacaaccatcgggcttaccggtactcccttcttcatcccgttcttgatctcctgtatttctgcgttgatgttgttgatatcgctcttaatattggctatctccgagctcatggagcctatctgcgcactgagcgtgctgacggcgtgctcgaggttactcacacgctgctccagcgacgtcacgggcgggacgccggttcctagcgctaccgtgcgcagaccctctaggtagtcgttgaggtcgatcttgacgagtaccttcggttccttggccccgattatggtcaccagtcctgtcaccgggtcgtaggtgatcccaccgacgggcgtaccgtccgggttggtggccgacagtctacccgtcagatcgagggtcttctggtgtgccattccgaagaggtcctcccagctggccttgacggtaatcgcaccgacgatcttgtacgtcgggctctccggggtcaccgagatagtctcggcactgagatcgatagtcacgttgtggaccacgaccgctaggtagcagtccatgttggctatgtcgatcacgagtgccgggatcgcattgggccaggtgttcaggacgatcccgtaggccgtgggataaacctccgaaaccatgtcactgctgacgccgccagtcgcctgagccacgatctgaccgctcgagtacgtcacctgcgcgggtaccgtgggtgtcttcagctggaacccgtagaaccccggcacctcctcgtcgataccgatgttgtcctcacccgatacctcgggtacctccagcaccactacgttcggtaccattcccatccagccaggcggaattggaatcatctggcggtgtgttcggatcgtcggcagtacccagtacacgttgtacgccatccctccagaaccgacgaagacgaactgcttggtcgcgaatatcggtgttgcacccacgctcagtgttctgagcagtggaaccacactgaggcttccgtccttgaccaggtagcactcaccgctcgtgtcggtaacgagcaggtacatggggctacctccgtagtacatcgagatcgtcgccggctggttacctgcggtcacgctgaacgtgaggctgtccgtgacgctaccgtcggcggcgatcttgaacaccaccgcgctggcagggttagctgagtcgtgcgcgactatgtacggaccgtcggcatcgtcgatcaccacgttggtgaaccctgccggcggcgcgagggtccttaccaccgtcaagctcggtgaggacgggttggtgatgtcgaggacggcgtacgcgttggtacccagtatcgccagcagcaggtgcgtggcgtctatcttcgtcagcttaacgccgctgatagtacccgccattgtcactgggaccgtcggattcgggggaatcaccgtaatcaccgatgtggtcggggccgtccagatctccacgacgggattcaacgcagcgtcggttccggtcacggcgatgtacgcgttaccgcccacttcgagcgggtggaagtccgtcagtgtggttatggcggtgggcacaccggggtacgaaatcggtgtgatcggcaggcctgtcaataccgtcagtgtgttcccgctgatggtcgcggtgccggtgtacctgtagatcgtaccggtcgtgatgtctatgtctacttacggtgaagtcgatgttgcctcccaccatctccgctttggctaccttaggctgtgtgtatactgtcgcaactatgggtgctgtagtccatgcctgggtgggagggttgcctgcctccacggcgccgagattaccgctgttgtctatgaccaacgacgtgggcttgctggctccctctacgttcaacccttggactggctgagggttcaacgccgcgttggtctgcgtcaacccgtgcgccggtcctacgacggccagcagcacggcggtcagggcggccagccaggcggccggcctgggtaggttacccaactccattccaccccctgcgaaccacatacacatgcgtttcctgaacactttagtttcctgacttcatgagatgacacaacgctcctctacaacctaaatacgggattatgcgtttcggaaacgtcggaggccgaaaagtcaccggcgtcactaaattagctgactagccgaggagtgcaggggggtgttcggatggcgaagtttccggaggcggaggcccggatcttcaacaaactgatctgcatgaagtgtaacgcgaggaacccaccggacgccacgaagtgcaggaagtgcgggtacaagggactacgacccaaggccagggagccgagaggcggttagaccatgggcgtgttcgggtacttgcgggagcgcaccccctgtcatctcaccctgctcgaccccgtggacgtgggtccggaggaggtcccggaggtcctggagtcgctggtgaaggcgggcacggacgcggtgatggtcggcggttcgactgcgcacgcatcgcaggtggaagcggtggtggaggcgatccgggaggtcgcggacgtcccggtgatcctgttcccgaacggcccggaaggtctcgcgccgaacgcggacgcggtgctgttcatgagcctactcaactcgcggaacacgtactacctgatcgaggcgcaggtgaagggcgcgccgttggtggagcggttcgggctggaatcgatcccgacgggctacctgatcgtgggcgagtggggtacgaccgtctcggtggtcggagacgcgcgggtgatcccgttcgatcgggtcgaggtgatcgtcgcgtacgcgctggcggcgaagcacctgggcatgaaggcggtgtacctggaggcggggagcggtgcgccggagccggtgccgcccgaggtggtgcggcgagtctcggggatcggggtgttcacgatcgtgggcggcggtatccggagcccggagaccgcacgggagctcgccgaggcgggcgcggacgcgatcgtcaccgggaccgccgtggagcgggacccagacctggccgcggagatcgtggaggccatcaaggacctttgaacctgaggagcccgacgaggtcacggagaaagcggtccggatcggccacgcggaggcgatgtactcgcccgtcggtcgtccgaatctcgacgacgctgacggcccccgcctctacgactctcacgtcctcaatgtccccgtacggtatgcgctccccgtcgaacttcacggcatctctggtcaggactacgcgccgtccggtgatacgttggagggcccgaccgagtgcggcgaggaaaactacggcgatcgccagaaacgagtacgtctgttcgggcggcacgttgaggcgggacctcgacaggagtatcgtggcgatcacgctgacggcattgatccaataggcggcccacattatcaacctgagcgtcctcgggattgacgggtactccaccccctcacccccgaggacccccgttcattctcacgtaaacgacttttcggagggataaccttgcgggccgtcgcgctgctgagcggtgggaaggactcgacgctggccgcgcacctggcggtcgaagagggttacgagctgacacacggactcaccgtggtgccctctgatccggagagcatgatgttccacgtgccgaacgcggacctgggggcgctagtggcccaggtgatgggactcgaacccgtgaggatacggtccggacgggacgacgaggcggacatcgaggagatagctcgcgtcctcgaggggctcgacgtggacgcgctggtctccggagcgatcgcgtccagatatcagaaggagcggctggacaggctgtgtgaggagcttgggatcgagcacgtgcacccgctgtgggggatggacccgttcgaagagctcgagctcctagtggagcgcggtttcgaggtgatgatcatcggcgtgtcggcggctggcatggacgagtcctggctgggccgcaggatcgacgaagacttcatcgaggacatccgacggttgtacgagaagtatcgcatccaccccgcgggtgaggggggcgagtacgagactctcgtcctggacgcccccctcttcgaacggaggatcgtcctcgaacgcgtcgaaaagcggtgggacggcttttcgggcgaactgatcgtggaggaggctcgactcatgcccaagcgacgatgatcgaactgagctatggccgagcgccgcggaggcgcgatgagcggggacacgggggtgagttcacacccccgaatcgaaagcgggtgaaaccggaaactgttaactttattttttttacgtggtgtaagtgtcggagggatgtcccggtgggtcgcgacgagggtgaggacaagttcgacggtggggatgaaggtacctccgacgagccggacgtacccgagatccggctcgacggagagtcggacggccccgatcacgatcaccccgaaggtcccgactcggattcggagcctcagtaccctcagaacatcctctcgcacgagggagaccacaccgacatcgacgtgtccaacacgaacatcagtacagccgagtccgacttggaggccgatctggattcgaactcgtacagcgaatcgagcagcgaatcggacgcgacccagtacaccgcccagtactccgacctggatcaagacacggatcaaatacaggattcgaggtccgaatcgatctccgacgtggagagcgtccaggaatccagctcggagtccaaccccgacgtggacgtaaacgtcgacaacgtcgtggacgttgacgatcccgccgatcccggcgttatctacgacgtcgacagggaggtcaacgtcgacgatagggacacgtacgtcgaggagaacgtctactacggggacaccgaccggacgatctacgacccgcggactgactcggacacggggtccgtcgacccgtcgtccgatccgactaccgccggggatcaggtcgtggtcggttccgaggacccgtacatggtcctggacacgcagaagggtcaggtggacgtgctcgtgggtgaggaccccaccaccataaacatgggccaatcggagctctcgcagctactggacctggtgaactggctcgacgggaacgcaccgtccgatgtgctggacttgctgtaccagctcctggcgtacctcctggagacgttctacggtctgatacccttggacaacatcctgaacatgatccagcagatcgcagagtacgcgctcagcggtgaactcggtctcgacgtgctcaaccagctgttgggcgtccttgaaacggccaccagcccgctgtacgcggccaccgagatcctgaagttcctcggggacttggacctgggtttggacgccctactggacatcgatatctgactctccgcttaacatccctcggatctttgcgacaccttatatttaaatctggaaacgtaaccgtattttcagggtcatacgatttacgtatcattcgtgcatgaaagttgaatgatagcacgtaaatagtatggtaccaatgcatagattacatgagcgttatcgcatggtccgtgcaagtgtaacgtattatcgtcgaagaatcgtaatattatttacgtacgatttttcgacaatcgtacatagatcgtaatatccaacatcgagttaacgcccgcgggaagttcaagagctcgatttatttgcggaaaagacagttcgatcacgtgatggcgttggcgtacttctcgacaatttcgacacctttctgtcgggccatctccgccgccatcttggcggcctcctgagccgcacgacccgcgtctttggccattacccaccagaggaccgatatctccaagaaggcccacacgcagatcgccgcggccagcagtaagtactcgactcctccctggccccggttccggagcacgtttcgcgacaacctaattcgcccccacgagttaaggaaactcaacctgcgacgctgagcgtgctgggtatcccgtcaactgtacgccaaaaaatatggtgggacccacccgagcactttcatgctatatggaacagaagggtaggcgggaacccgctacggtcggtgtcttccgatcagtttaaccgcggttaaggcgagtgggtttaccccgggcgatgaccgggctgaactcgaccgagcgtgccgggcgcaatgaggaagggaccacggggtgaggcccgctcggaggccttccgtaagccagggatgaggagcgctcccgatacggtttcccgcggatcggtgacgagtgcgggacccaaccgaccgctcccccttctactccctgtcctactcctcgaaggtgggtccttatttggaaactagccgtcgcacaaattgcatgtcgggcaccagaccgcgccgcctactatttgtgcgtctgtaacgtaaggaatttaagccggccgtttggagagtgtcgacggcacgcgggggaacggccgatggccggactacctacagcccgtcccgacgccacgcccgtccgggcaccggaacgcatccgcgtccccgaaccaccgcgggaccccgtcgaacaagcccgggttctacgcgtgctcctcgaaaccgtgagacgcggagtgctcccgttcctgggtgcgtcgtatcggtcggtgaacgggaaggtgtatgggccgtactacgaggctcggtggaagccgcggaagggcgagcgcggccgcaccatctacctgggcaagtccgagaatgagagcgtccggttcctggaggcgtggctatgggaggtacgcagggccgccccacggctggccgaacaccggaaggccaaatggttcgtcgcacgggccgtccggagggcgctcgcggcgctcctggcccggttcgagggcgacccagaggaagccctcgagctggcgggtgaggtcctccgcaaggtcggagggatactgacgggaatgccgttcgacccactgcggacgtactccaggccgaggggcggtagaaagctcctcaggatgcttctcgggcggacccctggcgagttccgcgacgttctcctggagatgctcagcccgtggccaccctggtactgtctgacactgctcgaacgtcttcacgggagaaccgcggcgcgcgagtaccatcgggcgagggttccgcggcccggatcggcggcataagtcgggaggagcgccggagaaaccggggagaaatcaccggagttccaggaccgcggccacgacctgtcccagggaaacgcccccgtcacccgcgggaacctcatggtgttccagaaggtccgccccgtagagctcccggaaccctcgggtgatcagctcgttgttgaacacccctcccgtgatcgcgacgggttccccgtcccggtgctcatctatcacctcggcgaacccctcgatcagggcgtggtgtgcggtgagggcgtaccgtaggtccccggtctccgcggcccgggccacgacgctcgagacgcgcaccgacccgtttcggacgtcgacgtccggttcgggcgcgtgatcgacccgaaccgcgacggcctcgagcttcatcgcgggctctccctcgtaggtccgttcgtgacagacccccagggccgcgctgacggcgtcgaggaaccgaccggcgctcgtcgtctcgatcgtcgggtgctcgatctggtgcaggatcacctcaacctcccgctcgccgtgctttagggcgtgaggccactcctcgagcctccggagcaggaactcgcggatctcttcctccgaccacccggccgcgtgtaggtgcgcggccgtcatcctgagcggtcggtacgtggcggcgtccccaccgggcatggacacgggttccaggtgccctatccgctcgtactcgttcccgtctacgtacaggatctcaccgccccaggcgcttccgtcgtcaccgtacccgtacccgtccatcgcggcggcgatcgcgggttcctcggccgggtcgagcccgtgctcggcgaggcacgcgagggcgtgtgcgtggtgatgctgtacgcggactagttccaggtcgtgctcctcggcccatcgcctggcgagtcccgtggtggcgaacgatgggtgcaggtcgcaggccaccgcgtcgacgtcgttccagtccaatcggagcagtcgcaggaaccgctcgacagtctcctggaggaaatcgagggtctgagccctggacgtgttcccgatgtgctgtgtgggatacgccttcccgcggtgcagcacgcaggcggtcacgtcgagctcgggtccgacggccacgacggtgaggtcatcaggcgcccactcgagctcgatcggctcggggacgtagccacgggagcgtcgcagcgatcgtggtctcccgtcgaggacgcgcactacggagtcgtcgcatcgggcggcgatacgtcgatcgtggactaagtagtaatccgcgatcccacggaggtgcctcagggcgtcggagttgcggatcgccatgggttcgcccggcgggttggcggaggtcatgacgatcgccggctcgtccaggaaccgctcgaacatgatgtggtgtaaacccgtgtaggggagcatgacaccgacggtgtgcagacctggggccaccagctcggagagggggaagggttccttcttgggtaggacgacgatgggccggaccggtccggtcaggaggtcctccgcggttccgtccacctcggcgaaggtgcggacgtcgtcgagggatccggacatgacggcgaatggctgctgagggcggcccaaccgctcgcgtagcttggcgacgggctcgtcttcggtggtcttgcaggcgaggtggaacccgccgatccccttgatagcgactatcttcccctcttcgatgagctcgcaagcctcgcggatagcctcgagctcctctccctcgacgacctcgccgtccgcgtcgagaagccggtatctaggaccacagcggggacagcagaccacctgagcgtggtaacgtcggtcctccgggtcctcgaactcgcggcggcactcctcgcagagcgggaagtccaccatcgtcgtgttctcgcggtcgtacgggattccctcgatgatcgtgaaccgtgggccgcagttggtgcacccggtgaacgggtagaggtacctgcggcttttcgggtcgaaaatctcctccaggcactcctcgcacaccggcgcgtccggggggatctgcagctcgacgtcctcggattcttcgctctcgacgatccggaagcctgggcctacgtcctcctccgtttcctccgcgtgtacttcgcgtacccgggcgagcggtgggtgctcctccttcagcctgcggatcagttcctcgagttcgtcgcacgtcgccttgactacgatctccacctcggatcccaagttgcgcacgtggccgtcgagctccatctccgtgcagagacggtacacgaaggggcggaagccgacgccctgaacgatcccgcgaactcggatcttccaggttctcatagcccgaaccgctctccttcccagtcctgctccgggaagtgctcgtagagaacctccgccgcgactccggtcgagaccccagccctggccgccaggtgaaccgtcgagagctcctcggcgtgtacggccaggaccacggggagctcggcctcggcccgatcggtgtcggaagcggcgtccacgaggaggctgatgtcgacctcgtccttccacttcatcttccggttcacgacgctccgcttggccagcttctcggccacggagccaccgttcgggtgcttgctgaggatcgcccagaagccacgcttcaacactatctccgcgagcacctcctcgtcgtccaacgcccgctcgcccagctcggtcggctcacagatctcgtgatcgggatgcaccaacaggtaccggaccagcgtcttgtagtagcgtaggaacgtgttctccgagacgtccagctcggacatcacgagctccgggtctcgcaactcatccacgagctccaacgtgcgcatcagcgagggcggggacaacgggttcgtcacgtagggctcgagggagagcctcacgcgccactgatgggacgggagcagcctcgcgtacgcgaacgcgtggacggagttctccacgaactcggcgtagtctcgcggcgtggtgttcagggtgtagccgaccgtacgacccagcaggtgattagagatcgccccgtccgtggctcggaggtacgacatgtccggaccgggttggcgccgcacctcaccttcacctactaggtactcgtccagtttcttcagggcttcgtcgaacgagcccacaccgttcacgaccagctcggcgggttccacggtgtgttctcccaggatctcgtccagcaagctggcctcccgcagggcggccatggtgagcatcgcaccttcccgcgggttcttcagacccgaaagcacctcccgcgccttctcgtacttgtcgtgcaccagtagcgcggccgccgtcgagatgatgtactcgtaatcgttcgtgaggcccgcctgccgaatgattctggcgagtcgctggtacagcgcctttacttccttcagatccgcccgcacctccataagcatcgctactgcgtcgtggtccaagtttcactcccccagaatgttgaccgtgttgatgagatcgcggaacgcgttcaactcgaactccaacacctcttccctatccacctcacagctcgcctcaccgtcgagcgtgagacggtcgggaccccgcagcacgactctctcgaaaccgtcacgttttaacaattcctccgcccgtgcatcgtgaacgagcgcccttccggggagtaccacggttcgcttcaacgaggagacgtccaaccgttccaggtccctctccgtgatcaggcacgccacgtccttctcgaccgggaccacgtccactttttccccaccctccacgtgtcggaacacctcgcggatcagaggggctgcgaccctcccggtgatcagcgaacactcgacctcgaccggtgggagcagctcccggagctcctcccccagcgtcctgagcgcgaacggggcgctcgtttcgggatcccacaacggcgtccccgtgacccggaacgggaactcctcgtgcacttccgttacgatccgcttgaactcgtccaaggagtgcggtttcacgtccagtacgagagagtttcctaggatgattccgtgttcctcccgcgtccccaaccgcatcaggaggagcgcgtcgatcccgagctcttccagtcgctcgcacgtcttccacaggacgtctccgtcgttcacacccgggatcaggacggccgccaccatcacctcctcgcaccgatccgcgaacacctccaagcacgcgagcgaggcctcgggagaccgatcacccatccattcccgccggagctccggatcccacgcgaacacggtgtacgagacggaccgcaccccgagatcgcacagctcttcgacttcctccgggtcctcgaaccccttcccgctcgtgtacccgagctggacgctccgaatcccgaggtccctcaggctcgccacgagctcccgcagccacgggtagttgctaatgtctccaccgccgctcacggtcgcctcccgttcccggcggaacccaagggacatccccacctcctgtagcacgaccccgggcgggcggaagggcccgttgtcttcccacacgctccgaccacagtagtcacagccgggggatccgggtggacagttcttgcaaccgaaagggcgtttttcttcccagtccaccccacggaagtaacagtaccggcagaacccaccgcagtccactcccggtcgtccacccacgtccgcgaggacgggcgaggtctcacccccgatcgtgaccgccctaccggcgggttaattaggtggcccccgggtacgcgccctgcgctcccacttgataacacggtcggcggtccggtgaataaggaaaccctttaaagctgcagccctgcgaagttaggggggcccgcttatggcacgcgaggccaaggacacggtcgatttgtacgacgatcgcggtaactgtgtggcggaagaagttcccatcgaggtgctctctccgatgcgcaacgaggccattcagagtatcgtgaacgacatcaagcgtaccgtcgcgatcgacctcgagggtatcgagaacgccctgcagaacgcgaccgtcggcggtaaggggatgaagatcccgggccgcgagatggacgtcgacatcgtggacaacgccgaggcgatcgcggacgagatcgagaagatgatccgcgtgtacgaggacgacgacacgaacgtggagcccatgtacgacggtaagcgtctccttgtgcagctcccgtccgagcgtgtgaaggtcatggccgacccgtactccggtaccctgcaggccggtatggcggtcgtgcacgcgatcatcgacgtctgcgaggtcgacatgtgggacgctaacatggtcaaggcggccgtcttcggtcgctacccgcagacgatcgactacttcggcggtaacgtcgcctcgatgctggacgtgccgatgaagcaggagggtgtcggctacgccctgcgtaacatcatggtgaaccacatcgtggccgcgaccaggaagaacaccatgcaggccgtgtgtctggccgcgaccctcgagcagaccgcgatgttcgagatgggtgacgctctcggtccgttcgagcgcctgcacctgctgggttacgcttaccagggtctgaacgcggacaacatggtgtacgacatcgtgaagaagcacggtaaggagggtaccgtgggtaccgtcgtccgcgaggtcgtcgagcgcgccctcgaggacggcgtgatcgaggtcaaggaggagctcccgtccggcttcaaggtgtacaaggccaacgacatggacctctggaacgcctacgccgccgccggactcgtggccgcggtcatggtcaaccagggtgccgcccgagcggctcagggtgtcagcgcgacgatcttgtactacaacgacctgctcgagtacgagaccggactacccggtgtcgacttcggacgagccgagggtaccgcggtcggattcagcttcttcagccactcgatctacggcggaggtggtccgggtatcttccacggtaaccacatcgtgaccaggcactccaagggcttcgcgattccgcccgtggcggcggcgatggccctggacgccggtacccagatgttcagcccggaggtcaccagcaagctgatcggtgacgtgttcggtgagatcgacgagttccgggagccgatgaagtacatcacagaggccgccgccgaggaggcaaagcgttaaactcccctctccccccggaagaacgccctcccgcacccgtggtatcgtttcgtaacccataacgaaagggggcgcgaccttgccggaggagaaactcgagcggccccgcatgttggagcgcaagatccccgaaggagccaagcccgaggtgcagatcttcccgcagcgcctcctcagcgcggacaccacggagaagctcctgaacgagctgctggagagggttgaaggtatcggtcgtatcgtgatccacggtccggggctccccaaggcagtccccttcggacccgcccgcggtaagccggtcaagcacccggaaagacgcccgatcgaagtccacggtgagaagatccccatgaaggtccagacgggccagatcatcgtcgagatcgaggacgaagaccgactcgacgatatcgtcgaggagatcgagaagatctgccgtgagatcctgccctgcgacttcgaggttcaggtgggaaggttcacccgacacaaacccaccgtcaccgactacctgaagttcggcgaggagggcgttaagaagctcgacaagcgtctcctgggactcgtcgagccccgagcccggctagccgacagggtctccgtcctcaagaagaagggggaggactaacctcgcgagtgggccgcgagacctacgccgtcgactgccgagccgccatggggatgggtaaaggcggtagtctggcgcaacggggcaccatcgccgagaccgagattaccgaggtcgtcgccgtcgcgatgtcgcccggttcccgccatatcaccaaacccgtgtgcgagatcacctacgccctccgagaggccgggatccacacgagcgtcctggtactcaacgccggatccggcgtcccggccgaagcccccgttcagacgggagccacgatggggatagagcccgaggagatcgagcgcatcaaccggcacgaggtcgccgtgatccacctcggtaacgtcaaacagcacatcgtgtggaaggcccggcttatcctcaaacactgcgacgtccctgcggttatagtgtgtcagacccccgtggacttcgaggatttcgccgaggtaggttgccgtacccgcatcgtggaaccaccggagcccgaaacggtaggagaggtagtcgagatcgtcaccggtgtgatccgcggagagaccgtcccctcggacaagatcaacgaaatcgtccgcaaggtcagacgcgccttacgttacgcccgtcggaggtctcggtgatctattacttctcacggttatcgtgttactgcgtcctcttctgagcaccgttcgtgggtaatccggcttcggtcgaaatccctttaaaatgacccgcccctcacacttcagggggctgaccttatgggtctgaaggaggagatggccgaaaaggctcagttctacccaggtgagaccgacgtggccgagaaccgtcgcaagtacatgaacccgaattacgagctgaagaagctccgtgagatcccagacgaagacatcgtccggctgatgggtcaccgcgagccaggtgaggagtacccgagcgtgcacccgccgctggaggagatggaagagcccgagtgtccgatccgcgagctcgtcgagccgacggagggcgccaaggccggcgaccgaatccgctacatccagttcacggactccgtgtacttcgcgccgatccatccgtacatccgcgcccgtatgtacatgtggcgataccgcggggtcgacaccggatccctgtccggtcgacagattatcgaggtccgtgagcgcgacctcgagaagatcgccaaggagctcctcgagaccgagatcttcgacccggctaggtccggtgtccgaggagcgaccgtgcacggacacgccctccgactggacgagaacggcctcatgttcgacgctctgcgtcgttaccgcctgaacgaggagacgggcgaggttgagtacgtcaaggaccaggtcggtatcgagctcgacgagccgatccccgtaggtgcgccggccgacgaggacgacctgaaggagcgcacgacgatctaccgcatcgacggtaccccgtacagggaagacgaagaactcctacaagtcgtccagcggatccacgagctacgtaccctagccggttaccggcccgaagaggctgagggtaagtaactccccctcacacatgctcatacgaaacaatctcggagtattttggaaacgcttataacgctctcgacctatcgccccatgggggagaggatcacgatgtcctcggctgaggagaagctcttcatgaaggcgctcaaggagaagttcgaggagagccccgaggagaagtacaccaagttctacatcttcggtggttggaagcagtccgagcgtaagaaggagttcaaggagtgggctgacaagatcgtcgaggagcgtggagtcccgcactacaacccggacatcggtgttccactcggccagcgtaagctcatgtcctaccaggtctccggtacggacgtgttcgtcgagggtgacgacctgcacttcgtgaacaacgccgcgatgcagcagatgtgggacgacatccgccgcaccgtcatcgtcggaatggacaccgcccaccgcgtgctggagcgccgactgggtaaggaggtcaccccggagaccatcaacgagtacatggagaccctgaaccacgcgctaccgggtggtgcggtcgtccaggagcacatggtggagatccacccgggtctgacctgggactgttacgccaagatcattaccggtgacctcgagctcgccgacgagatcgacgacaagttcctgatcgacatcgagaagctgttcccggaggagcaggccgagcagctgatcaaggcgatcggcaacaggacgtaccaggtctgccgcatgccgacgatcgtgggccacgtctgtgacggagcgaccatgtaccgatgggccgcgatgcagatcgcgatgtcgttcatctgcgcgtacaagatcgcggccggagaggcggccgtgtcggacttcgcgttcgcgagcaagcacgccgaggtaatcaacatgggtgagatgctgccggcgcggcgagcccgaggtgagaacgagcccggtggcgtcccgttcggcgtactggcagactgcgtgcagacgatgaggaagtacccggacgacccggccaaggtcgcgctggaggtgatcgccgccggagcgatgctctacgaccagatctggctaggatcctacatgtcaggaggtgtcggtttcacgcagtacgcgacggccgtgtacactgataacatcctggacgactacgtgtactacggtctcgagtacgtcgaggacaagtacggaatcgccgaggccgagccgagcatggacgtggtgaaggacgtcgcgaccgaggtcaccctgtacggtctggagcagtacgagcggtacccggccgccatggagacgcacttcggaggttcacagcgagccgccgtctgtgcggccgccgcgggctgcagtaccgccttcgcgaccggtcacgcgcaggcaggactcaacggttggtacctgtcgcagatcctgcacaaggagggtcacggtcgtctaggattctacgggtacgccctacaggaccagtgtggtgcggccaactcgctgagcgtgaggagcgacgagggactgccgctcgagctgcgtggtccgaactacccgaactacgcgatgaacgtgggtcacctgggcgagtacgcgggtatcgtgcaggcggcgcacgcggcgcgaggcgacgcgttctgtgtgcacccggtgatcaaggtggcgttcgccgacgagaacctggtcttcgacttcacggagccgaggaaggagttcgcaaagggcgcgttgcgagagttcgagcccgcgggcgagcgagacctcatcgtgcccgcggagtaacgcctccacgccccgccttatttcacaacacttttaaaccgaagttcgggaacttccgcgaaatcgtttcaacacccttaacgtgagttcactttcgtagctctcaactcgagtttagggggtacgcccttggtagggttcaccgagatcggtttagcggccgcgatgggcgcgctggccaccatagccggagcgttcgaggacgccgagtcggacgtaggatcccagtccaacccgaactcgcaggtccagctggcgccgcaaatgatgaacttccacaggtacttcaacaaggcgatctcgggagagccagtttcctacatgctgtacggagcgatcgccggtacggtaacctgggtgatgatgaccaagttcgggcttccgttcctcgccgccgcggcggtaggcgtcggtgtgaacgcactaattcacatggtgttcgcgaccacggcccacctgggtagaatggcgagcgcggccgagttcggacacccgatctacctggacgtcgtactctcacacctcgggccgatcgcgggcttcggagggatcgcgaccttcgcgatagtatcgctggcctacatccagtgggcgctcctgaagcacccgttcccgctgccattgctggccgcactatggggcgtaacggtcggcgcgatcggatcctcgacgggagacgtgcactacggtgctgagcgtctgtaccagcactacccgttcggcggcggtgttccggtagccgctcacggtaacatcacgcggaaggccgagaccggaatccggaactcgatggacagcgtctacttctgcgccaagttcggtaacccgctcacgggcctgtgtttcggtctggtggtgttcttcagcacctgggccggcctgttcgggcagtggggcgccgtgatcgccatgggcctggtcacgctcgggtgcctgatcgtgagtaaccgtgtggagaagaaggcccgcgagagctacggtacctacgaggacgtcgagatggacgagatctgtgatccggtgtaagggggaccccgcgttgggtgagtccgccaagctgaacgcccgagggttcgggatcgccctgtccctgatcgccgtggcgacgatcctggcgaccttcggacacttctggacgtccgtggacaagctgatcgcggtgctggtactgatcacgctcggtagtatcatggtgaacgtcggtgtacactacgtgccggtgggaggcgctccggccgcgatggcgacggcgacgggagtgggtacaggtaccacccagctggcggcgggatccggactgaccggacttatcacggcggcggccatgagccagaagccgttcctcgtgatcctgtggaacggtgccctcggagccgctacaatgatggccatcaccatgctggtgggtaacttcatctacgtctacggtgtcggttgtccaccgtgctccgctaaggtcgacaaggacccgatcaccggctgggaccaggaggcgtacgtcacgcccggtacggagggtcacggaatcccgacggtcagcttcgtgagcgggatcctcggaggactgctcggaggttccggcggtgcgatggtgtactacgcgctctacaaggtgctcggaatgagcgcggcgctggccgggatactggccatgggcttcttctacgcgaacgcggtgctggcgtcgtacaacatcggaggtacgatcgagggttaccacgatccgaagttcacgaggctaccgaaggcggtagtatgctccctagtattcggtatagtagcgtccgtgatcgcgtattacctctcgaccctcatgtaacgggggagtgtgaggaaccttgatcctgcgtacactcctgatctccgccgtagcaccgggtggcgaggaggaagaggtagaggtcgccgtagcgatctcgcccttgaaactgatgacggccggcctgatctgcggaatactcggtaccgctttcgcctgggttcacccgttgatcccggcgttggcagtgattccggtagtggtctggggtgccgacgcggttaggagggtcgcgggctacggactgggtaccggagtgccttccatcggtttcatgggactcggtggcggatccgtcgccgcgatcctggcggcggcgctgtccggtaacaccgtgcccgcatgggcggcggccatcatcggaacagtcatcggcgccgtcgtcggggcgctgctcggcgtcctggaccgccgcgtgatcaagatgaagatcccggtgatggagcgctgcagcaccgagatcgtggcgtccggaacgctggcgctgatctgtctcatggcagccgtcgccggcgacttcacgtggtccgcggtgtactccaaggtgatcgcgacgggtctcatcgccgtcctctgggcgatctgcgcgatctcgctgctgcacccgttcaacgcgtgcctcggacccagtgagacgcaggagcggacgctgtggctgggcgcggagtgcggctcgctctgcacggtcgtggcgggactagcgacggccaacccggtggtactactggccggtgcggccgcttggctgatcaccttctggaagttctgggagctgacgaagcgcgacgccgcggacgtagtgtggactggaatcgtgcccaagggtgagtaaggggtgaacgaccttggcgatcgtgctcatcgacccggagagccagatcgcgatggacgccgtgaccggagccgtggcggagtggagcgaggacgtggtgacgctggacgtcatgccgctgtacgagaaggtcgaggagctcgagcagtacgtgaacgacatgatgcgcgccatggacccgtccactacgacctggggtacgctgcccggtcgtgagggcgtacacgagacggccggcttcctgaccaacttcgcccacggtttcgtcataggtacgatgatagtggcgctcgtagccttcaccctcgcggccgtgtacaagctccacgccctgcgccttctcggcctctaatcccttcgtagggggtgcttgaggtgcccgagaaagccgaaccggccgagggctggcccgtggtcgagggagactacgtcgtaggtgatcccgaggctcccgtccacgtggtcacgctcggatcccacatcgaggaggacatcctgaaggccgccggtgaggacaaggtagccatcgccggcccctgtaagaccgagaacatcggaatcgagaaggtcatagccaacgtcatcgccaacccgaacatcaggttcggcgtgctctgcggtgcggaggtaaccggtcacctcacgggtcagtgcttcaaggccatgtacgagaacggtgtcgatccggactccggagagatcatcggggcggagggcgccatcccgtacctggagaacatcccggaagaggccgttgagcgctaccgggaccagatcgtggagctcgtcgacctcatcgacgtcgaggacgtcgacgagatcgtcaaggcgatcgaggagtgcgtggagaaggaccccggagcgtacgaggaaggtccgatgaccatctccctcgaggaggaagaagaggaggaactcgcggaagtcgccggaatgccggtgtccgcggagaccgtgaccgtggagtaccgcattaacgacgtgcgagtcggagttaagagcatcggcgccatgcagagatacatggcgggctacctctcaggacgcacgatgggattgctgatagggatcatctcaggtatgatcttcctgttcctgccaatggtcgtcctgggtggcgtctgagggggcagtcacgttggcggaagaggagtccgttcccaagatggtcgctccggaagacgacatccgtgaaatccactcacgcttggacgaaatcgagcgtcgcctggacttcgtgtggggtgaagtttaccagcgcttcggcaagaggatcggtcgagacatagggatcctttacggtctggtgatcgggctgtacctgtgtatgctttacatcctgctgggagtagcgttcaggtgacaaccttgggggtgttggaccgttgttctactacccgggtaaggagcagaaggtgtgcgacatctgcggtgtgaaggtcggtggccagcccggtgagtacccgaccgtgctagccggtaccatcttctatgccggacacaagatcgtgaaggacgaggacaaggggatcttcgacgaggaggccgccgaggagctcatcaagatggaggaggaactcgccgacgagaccggtaacccgatgatggcccacatcatgggtgagtcagaagaggccatcatccgctacctcgactgggtagccgacgttaccgacgcacccatcatcgtggactccaccgaagccgaggtcaaggtcgcggcggtaaagcacgctcaggaggtcggcctcgccgagcgggtggtctacaactcgatcaacgcctccgtcgaggacgaggagatccaggccatcaaggagtccgactgcaactcggcgatcgtcctggccttcaacccgatggacgcttccgtcgagggccgtatgaaaatcctcaccgagggcgaggagggagtatccgagaagggcatgctggagatctccgacgagtgtggcatcgagaacccgctgatcgacacagcctacacgccgttcggctccggtgcgggtaccgcttacaaggtgacgctcgcggtgaaggccaagctgggcctgccggtgggcggtgcgccccacaacgtgccgtccgcttgggactggctacgtgacttcatgaagaagctcaaggaggaaggcaaggaagagtgggccgagctagcccacgagtcctccgactggggctccaacgtagtggcggcgacgctgtgctgcgactacctgctgttcggtccgatcgagaacgcgccggcgatctggccggtcgtcgccatggtcgacgcgctgatcgtcgaggccaacgaggacgtcggcgtcgagccgcaggtggaggagcacccggccaacatcgtccgctaacgccacagaccccgtttttttcgcttccaacagtctctcccgggcgtactcgaccgcgtacggattctcgtccgagaacctcggaccgtaccgctccagaacatcctcgattttctcgtaacactcgctcgggacgcgacccgtggtcgcatcccagccgaacagattttccacgcgcttaagccactcgcccacgcccttggccccgtgctccagcatggcctcgatccactcgtcgttcgccagcttctgctccacgagccgcaccagctcctcctcgatgggtctcgtgatcaccctatgcgggtccgtcgtgtcgtggtggtagcactccacacgctcgcccgagtggtgctcggcggccgccaccatccccccgtggaacgcgaaatggcagcagcagctcagcacatcccactcgtgcgaggactggttgacggagacggccctcacggtcgagagcgcccgtcggaactcggagaaggcctcctcaccgtacacgtcactgccgtaggcgtacccaccccaccgcacgtacacgtccgcgagatcggatctgtcgtcccatgcggaggcgtgtacggcgtagttcaccccggccccgtacgctcccggtggatccccgaagatgcgatggtcgagggcgtgcttcctgacgaagttccacccttccggttcgtccaactccctcacggcctcgaatacctcgtcgaggaacttcaccaggttcgggaacgcatcacgaaacattccgcttatcctcaccaccacgtcgatccggggccgttccagctcctccaacggcactacctcgaagccgctcacgataccggattcgtcccactcgggtctcacgcccaggagccacatcacctgggatagaacctctccgccggttcgcatcacgtccgacgcccacagcacgataccgacggactccgggtagcgtccgtgctcctccaggtacctctcgatggtgttctcggccaacttcttcccgaccttccatgccctgcgggtcgggaccttccgcgggtctacggagtagaagttcttccccgtgggaaggacgtcgacgtccccacgggtcgggttaccggccggtccaggctcgacgtagcatccgtccagggcctccagcgtacggtcgatctcccgttcgcacgcgagtaaccgactcaacacactccgcacgaactccttcgcctcgtcggggacgtgtttccggagctcctcttcgagctccaacctcggcaccccgggcgttggtagcacgaaagcgattcaaggtaatacagaataagtgttcggggatcaccgttgcgagtcctgtgcgtatgctccggcacgatgttgaaagccgcccgagacgtcgcggagcggttctccgagctgaaaatcgacgtagcttaccaggacgatccgatcgacccgaatcggtacgacctcatcgtgctactgaaggtaacgaacgtgaaccttccgacggatcacgacgccgaggtcgtcgccgtgcccctcgacggttccaccgggatacagcatctgaacactgccccgtcgagcgtcgtcgagcgggccgcggagtacctggagaagggcgggaaggaaaacctcgagaatgagcgcgggttcgagtcgttcgagaagctcggtgtacccgtcctgaacgccgtggtgtcgtggtacaccgaccgggacgggtggcgggagtccgagggagggctctcaccggccgacgtggcgtacggaatatccctggcggagctccagggtaggatcgatccggtgctggtcgggaccaagcgcgatcgtggagagttcgagcccttacccgagcggtgccggctcgccgcacgacgtgccatccggtgggctcgactcaggcgcaaggaccccgccgagcgtcgcgtcgccgtggtgctcaacaacgggatatgctccggaggggaggcgaggatcggtgctgctatgggactggacacgttcgagagtctcgctcgactgctgcagcacatggccgaggaggggtaccggctcgactgggtacccagggacggtcgggagctggagcgcgagttcttccggaggaaggccttcgacgagttcaagcgcacgcgcgtggaggatatcgtcgcgtccggtggggccgtggacctcgttcccctcgataggtacctcgagtggttcgaggagctcccggaggagctccaggagcgtatggtcgagacctggggtgaacctccgggcgactccatggtgctcgacgaccacctagtcatcgccgggatccgaacggggaacgtgttcctgaccgttcagccgaagcgcggctgcgccggtaccgagtgcaacggggacgtctgcaagatccttcacgatccacactgcccgccgacgcaccattactacgcgttctaccggtggatcagggacgagttccgggccgacgtgttactccacgccggcacccacgggaccctcgagtggttgccggggaagtccgtgggactgtcccgagagtgttggcccgaggtgtgcttgggcgacctgccggtagtgtactggtacatcgtgagcaatccctcggagggagtccaggccaaacgccgcgggtactcgacgctagtggatcactgcccgcccccgatggggactaccgaggccggcctagaggagctcgaggagcggctcgaagaggcgctgcgcgacccggatcgcgaggaccggcggctcttcgaggaatgggaggtccgctcgggggccttcatcgaaaagggcttacacgtgatcggcgaacccgcgtacgacccggagcgtctctcggagttcctgttcgctctctgtaggaaccgactccgagagctgatcgcggagtcggctgggctggatctggaggagctgaccgagcgtcccgaggcggagaacgacctgttcggcgccacgaacgccgaggtgctgagagccctcgatgcggtgatccgaggactgtgtgaggagaccgtctcggaggcacaccacggacccgaccgaaaaggataacctccccggatctcgggacccgcacgggctaacctatgggattattctccaagctcttccgtcgcggaccgaagcctcaaatcgcggagagcgagcgggtcacgggccccctagccgtcagccgggactactacatcgtggcctccgtcgagctgggtaacacgaccactaaatgcatcctcacagctaccgacctgaaggaaggcgtcacgtaccttattcacaaggaggtacgaatgaccagggacgtgcgcccaccgcggtccggagaggaggtgttcggaaagaccgtgtggggtgtcgagctcacgcgggattccgtggccgagatggtggcggacacgctcaagtcggccgtcaagaacgccaacatcaagatcgacgacgtccacttcgtcgtgcgctccaccggtgtgaccgccgggttcgcgtccccggaagaagtcggcgagatgatcaaggcgctcgcggacggatgcctgaaggccggagtgcctcccaataggatgacggcggctatgagcaaagagcagatcccggagcccttcagggagcactccctcatcgacaaggtgtatttcgacggtgccgtcaccggcgtgaagccgccggccgggaaggaggtcgtggccaacgagatggaaggagagctggtgatggccggcatcaaggtcggcgccaagtccacgaaggtggacttccgtaacccctgcatggccatagactacgggaccaccctcgcgggcaggatcaccaacgacgagctcccctacgcggatacgatcgggaacctttgcggtctcgccggtgcgatcatggacgcgatcgccaggggatgcggggagatcgacgaggagatcggctgcgccttggacctaccctccgacgtcgagcccgacgtaggggagaaggcccgcgagctggcggaggaggcgcacgagtacatcgacatccgtgagatacccgctaaccgagagcgcttcggtacggttccggtgaatcccaaggccgcgaagaaggcgggtctcaagctcctcggctgcgacgtcggtgagaacggcagtgatctatcccgactcaccgagatcggccgtgaggcgtacgaagagggaggttacgagctactcttcggagtcctggactggaccgcgacgctgatcgccaaacgtctgatcgagacggccctcgacctggatctgatcgacgagaacaccgcgatcgggatcaccggacgtgccggcacgacgggcaagaagccggagctgatctgtcggatgatcgcggaagagttcggagactactgggacccggaggaagacctcgtcttcgtcgacgacggactcgcccgaggcgccgctacgatggcccgatgcatgaactgcctcgggaccccggagaacccgctgggagggaaccgtggcgggggttgtatcctcggtctcaggatcaaacaccaacaggagggttcctgacgtaccgccctccggcttccaggaagtactcgagagcctggagtcggtggaaacgtgtcgagacctcgcctacttatgccgcgaggtcgcccgccgtgccgatcccagggtcctagccttgctccgcagggacgcgtggcggcaggcccggttcgtccaccccaggagctaccgtgagaagatcctacgttccctgttcttcgcactgaccgcgaggatcaaccagatgcggcgactggaccccgaggaatacccggaggaccccatcgagggttacgataggttcttggagatcgtacgcgagtacgccgaggacccggactacgactccccactactcctcctgtacgagtccctctcggccgcctacgccatcttcctacgcggtgagccggttcacccgcccggtacggagttccccggagtagggaaggtccgtcggacggacgactgttactactgcccgatcaaggagcgacgtgaggatcagccggggtcgttctgcaccttatgtccggcggaacaggatccggaggtggtatcgtgaggcctgtggtgacggtcgtgggcagtcacccggtcggtcacgagcccacgctcaaggatcgcctcctcgagaaactcaggaggaggtccgcctacgctcccgccatacatgaggccgtccgcgaccagacggaggcgggtgtggagctggtctccgacggccaggttcggggggacatgatcgagatcttcgcctctcacatccccgggatgaccgtcgaggacggccccgcggtgataggtcgggtggagccccccaggttctcgcccctagtgctcgattaccgcgaggctactcgggtcgcgggggaggtcgaagtcaaggcgatcctcaccggcccggtcacgctgtgttattccctcgaggtgcgcacggatctttacccctccaacgaccattccagcctcttgaaggacgtggcgcgagccctgtcggcggaggcccggctactccggcgcgaaggggcgagcgtactgcaggtggacgagccgatactgtcggccggtgtgacctccgttaagaaggtggctcgatacgtgaacaccgtcctgaaggcgttcaagggcggtaccagggtcctacacgtctgcggagacgtcaccgaggtgtacctcgatctggaggagaacatcgacgccgacgtgttcgaccacgagttcgccggtcacccggagaacctcgaggtcgtcgccgaaggagatagcccgatcggcgtcggagtggtgcgctccgataccgaccgcgtcgagagtttggacgaggtggtaggactgctggagaaggcgcgggaggcgatgggagaccgtatcgagttcgtggaccccgactgcggtctccggaagctaccccgtgagatcgccaagaagaagctcgaggtggtccggaaggccagggaccgcgtgtttcgttaagtcttgtgaggctacggcgacgaaagacaatattaataatattcgaccttatgatggtaatacgaggtgctaacggtgacggacattgttgagaaaatagccgaaatcctggagcgtggtgacggtaggtatctgatcatggggatggtccaggctcacgggttaggtctgcgctccctggccgactcggtagacgtcccggtcgaggtgctggccacgatcgagatcgaggggttcgggaaggtcccccacaaatcgctcgtccgcaagctcgcggagtggatcgaagaaagggatctggacccggaggatctcgtcaaggccggttgggcccgcttcgagctcgagtacttcgagccggagctctggagaagatagaagacgacgaactccgagcggaaatcgagcgtaaatcccccacggaactggatctgatcaccctccttcgggtcgcagaagccctttcgtaaccccctcagaccgtatgcccctcttcacactctccgccactttacggttcctcatcgggggattaaggtaatcatcagcacgtacgtgagtaatgtcccgcccgcgacacccaccgccacttgataacccgtgtgggcgttcaacttcagcctcgcccaacagacgaccgccgtcacgatcgaccagggtatccccgcccaccattcccccaaccacgcgatcgcgcccatgacggtgcccatcgaggccgcgtgaatgctgattttccagaacctggtcactccggccaccgccatcgcggctatcgcgtaagttaacatcaggcaaaccatggggcgcgtgactcctaccttgcacatcactagggcgccgatggcgtggtagatagcaccgaccgtcaggagtggtagccggtcccgtctcttggagacgaacacatcggtgcccttcacccggatgtaaactgctgccgtgagtatcactaacagtactccgaagaacagccccagcgctgtacccaccacgtccccgtacttcttgcctacgaggatgacggtggccgcctcggcggtcgacgggttcacgaccagagagaccgccttggcgacccgctcgatcgcgccaacacccccgtcactccctgctgaccaggaccgctcctatcactatcagtatgcacccgaccaccgtctcgacgctaggccgctccctcagggccaggatggaaaacagtgtcgcgaacagcggatacgtgctcgacaacggcacgatcctggaggcctgcccagagctgagggctaggtagtaaaggtacagccccaaccctccggccagtatcccgccgacgatcatgtagccgacgtatttcaggccacccacctgcgacctaccgacggccagacacaccaccgcgaggaacgccaccgccgccaggctccggatcagggtggccgtcatggggtccattccacgtagcccgactttctcgatcaccggcgctaggccccacagtaacgccgccaacagtgcgtacgtctccgccttcatcccacgaactccacccttttcacccgtagtaccttcagccgctcggtcgggacaccttcctcgggctcctcgtaacccgccagcacctcgacctcttcgtgcggctccagctctcgacgctcctcgagcacgaggtcgccttcccggatcagcatggcgagcttccgcttcacattcgcgctccctattctgatctccagctcctcacgctccccctccagcctgactcggttgaactgcaatcactcaccctccaactcccgctcgagcctttcgacggccgttttgacgtcctcctctcggacaccgatggcagcgttgatggtgatgtagttcgaatggtacccccggagccggctggttccgaacggatcgtccgcacgaacacccctcggtcccgtgaccctcctcacgtacagcctggccgcgaggtccacggggtcgtgcccttccacggcgaccgccgaggctatcgggttatccacgtcgagcacgcggacgtcgtctcgacgggcctcgagatcctccaacagctcgtccaaaagcgctttgcactccttctgcctccgcatcaggcgccggtatcccttcatccccaaggagagcagcgagattaacgcgtgggccaccggtgccgcgctggcgcgaccaggataagccctggaaacctcccggagcgtctcctcgtccggcgcgtacacgatccctccacccacgggtgttaggaggttcttgtccgtcgagcttacgaccacgtccacgcgccctcgcttgatcgctcggttcagtagatctcggtactgctcgtgctggatcccgtaggcggcgttcacgacgtgagggaccccgtactcctcgcagagttcggcgatctcgggcagcggatcgctgcttcgcggtgggaagaacgtcagcgtgctcagcacggcagccggggactccgagcgctccaaggcctcctccacatcccctgggtccaccacgatcctgtcaccctcgatctccgtgtccaccaccctcatcccgaagccggccagtcgcacggctttaatcggactcttgtgggcggcgtacggatagatcacctcctcgccttcacccaacgccgacaggcacagcgctatcgacagtcccgtagcaccgggtaccacgaaggcaccttcgatccggaacccgagcctccggaggaagtccgtgaccagcctgttcgttaacgcgtacattatcgaggcgcccggagccttcggctgtggatccacgagcgtcccgctcctacccacaccgtggcagaacccgaacacggactcctccgcaagccttgaggctacccgggcttccctctccccgatacgtgccgccttggggtccttgtcggtgtccatcctcgacagctcccacaggaacgtcgcgatgacgtcgtccggccagccctcctccggcatcctacgctcgctgaggagtcgttccacgggttccctgtaggagtcgagcacggtacgcccacgctccagcatgtggtcggggatgagtccccgcatgtcctccgggtccagcaaggtcgacaccccggtcgtcgagctacgtgggaagtcgagagccgtctcccgtgaggtactcctggcgctcgaggagctcgaggagctgaacgttaaagtcgtgagcgctggggtcgacctcggcgaggaggaccggcccacgttctacgcggctcgattcctggaccttcccgagctcgaggtcgaccggagaacggccgtccggttgctccagggggaggaaatcccggtggacgcgaggccgggccattaccgggtgatcgtcgggaacgtggtcctgggtgtggggaaagtcggtcgtgacgggaaactccgatgccgtgcaccgaggaagtacgcgagactcaggttgtggtgagcgatgaggtacgtggaagagttccgtgagcgtttggagcggatcttcggtgaccgtgccgaggacgtgtaccggtacctgttggagggtcgtccacccacttacgtccgggtgaacacgctgaaggcggacgtcgaggaggttgtggagaacctcgaaacggcgggagtcgagctcgccgaaaccccactatcgtacgccttccgtgtcctcagtagtcccgggccgctgggttcctcgctggaacacgtggccggttacctttaccttcaggacctggcttcgatggtccccccggagctccttgacccggaacctccgggtcccgtgatagacctgtgcgcggcccccgggagcaaaaccacgcagttagcacagctgctcggcggcgagggcgtcgtactggccgtcgacgccgaccctcggcgcgtccgggctctggttcacaacgtgaacaggctgggatgtgtcaacgtgatcgtggcacacgccgacgcggcacgtctgcgtatcagcgcccctttcctcctgctggatcccccgtgctcgggtgagggcaccctgcaccgagatccacacgccctacgtacctggactccgaagaaacccgggaggttcgcccggacgcagctgcgcctcctgagggccgccctgaggatgctgccgccgggcggccgtctggtgtactcgacctgtacgttctccgtcgaagagaacgagctggtgatccacgaggctctagggaacgacgacaggtaccggatagtcccgtccgtcccacggtggctcgaacctcacaccgtccccgggctaaccgagtgggaagggagggagctccgggaggacctgaggcacgccttcaggatcgatccggccagcctagaatccgacggttttttcgtcgcggtaatcgagcgtcgccactgacaatttagtgtacgaccgtcaccctccgagtgggacttaatcacgtccacctccactctctgcgggtgatcacgtggcaggagacaacgaagcgaccgaagtcgacaagcgcgatatcgccctactccgcgccttagagggcctgagcagggccttcgagtgggttcccgaggacaagctgctggaacggttgccgatggattactcggagctggcaacccggctggagaagctggattccctggggctgatcgattaccggtacataccgacgtaccagacctacgccgccaggatgaaggagcgggcctacgacaccctcgctctgtgggacatgaagaagcacgacgtctacgagcggctcggaacgatcataggcgagggcaaagaggcgacgatcgtgaacgcgaaggaccctgaggacgagtgggtggccatcaaactgcacaggtaccacgccccggaattcaggaggatcaagaagacgctcgcgtacgccgccgtgaaggttcgcggggaagaacttcgggtggacgaccaccgcatcgacgtaccgcgcgccaaggcccaggtcgagatgaaggtgctccagcgcctccactccaaggggttccccgtaccggggccccgagccatcaaccgtcacgcggtcgccatggacatgatcgaggggcacgccccgggtataccggccccactgctcgccaagatcaaggttaagaaccccgaagaggccctcgaggttatcctggaggactaccgggagatcgtcctggagggccactatgtccacggcgacttcagcgagcacaacatcctggttacacctgacggcgaactgtactacgtcgactggcctcaggccgtgccgatcgagcacccttccgcaccgaagctctgctaccgcgacctcaagaacgtaatcgagcatttcaggcgtaagtacaggatccgcgtccccgacccgaaggaagtgtacgacgagatagcggacgacctccagtcgctgatggaggagaagaaggaggagtacgaacggcacaagaaagccgccgagagaaccctcgagaggttcgaggagagcgtcgagcgggtggaaggtaagcgtgaaggtcgtaaggccggaccgacggaggacgaggaggacagggttcccggaggtggtgatggcggagggtaaaacccccgagcaggtctcggaggccctggaggcgctcctacggagcgaggggatcgcgatagcgtcccgcgtcgatccggagctcctcgacgacctggagataccggaggacgccgacgtggagtacgacgaggccggtcgcgtcctcgtgctcaaggatccggagtacgaacccccatatcggggcggacgagtaggggccgtcgcggcggggacctccgacctgccctacctctccgaatgtgccaccgtgctggaggcgttggggatcgaggtgcacacggagatcgacgtgggagtggccggtcctcaccgactcctggccgcggttcggaggttgcggaagttcagaccgcacgcggtcgtggcggcggccgggatggacggaacgatgccggtcgccctcaacgcgatgttggacgttcccgtcatcggcttacccaccccggtcggttacgggctcgggggctccggagaagcggcgctgctcggtatgctacaatcctgctctcccggactcgtcgtcgtgaatgtcgccaacggaatcggtgcggcggccgctgcggttaaaatcgtcagggtgtgtctggagggggagaaaccatcgaagaaacccagaaactcacgacgctgagggacgtggaggagtacgtcggaatacgggagcgggtgatcgatcgaggtgtcggagggtcgtgcagggacagggtggaggacttcctggtcatggaaaagccctcgaggaacacctacattcccctgaccatcgtcggtgagtgtcccgagtgccgcgagtaccaccgagggcgggagtgtcccgagtgcgggcaggatctacgccgaccgcggcttcgacctcagttcgggggtcgcggtccacatacgctgttctacctggagaagtacgactgggacaccatgaaggccgtacgtaggatcgcacaggccttgaggaagcaccaccgtcacttcggaatcgccggcatgaaggacaagcgggccgtcacctcccagcgggtaaccgtgcggggggtacctcccggagtcctggcccggctcaggatccgcgacctcaagatcgtaccgatgggccgtgctcgacgcaagctacgtcccggagacctgtggggaaacaggttcgttatcaccgtgcgtggcgcgaaggtacgtcgactccccgaagccctgaggacggttcgggagctcggaggcgtgcccaactactacggtctccagcggttcggcagccgacgccccgtcacccacgtcgtcggaaagtacgtggtactcgaggactgggagaaagccgtcaagaccttcctgaccctcgaatacccccgcgagtcacctgaagccctcgaggctcgacggtggttgaaggaacactggggggagttcaaggaagcactacggaggttccccaagttcctcgactacgagcgtcacatcctcgagcacttggcccgacatccgcatgactatatcaacgccttccgtcgcctaccgatgtggatacgtagaatgttcgtgcacgcttaccagtcgtacctgttcaaccgcatcctctcggagaggatcgcccggggtctcccggtccaccggcccgtcgagggggacgtgacccaggacggcctgcccaccgtccccctccccgggttccgcacggagctcagcgacggcccacagggcgaaatagagcgtgaggtgttggaggaggagggcgtgaggctggaggatttcgaaataaagagcatgccggagctctcggccggcggagaccggaagccggcgttgctccgagtgtacgggctgcgtgccgaggcgatcggtgacgataccgtacggttcacgttctcgctgcctcgtggcggttacgcgaccaccgtcctgcgggagctcttagggtcggagggagtgtacgccgactagtactcgtagaaggcggcgctaccgcactcctcgcacagccccgcgaaccgcagctttccacgctctcgcttggccctcttgtactcctccttcgtgcagttcggacagaccaccgcggggtcgttgggcgacacgatcggtacgtgagagctcttcaccatccggtatcaccccctacgtcgccgtaccggcccacaacgccgtaggtaaggtaaaaagaaaaccgccgcggctcgtggtggggcggcgcggtttgagcgtcctcgagaggatcatccgcggatcggatctggatcgggaagaggcccgcgatttgatgtgtcgaatcgtcggcggtgagctttccgacgttgaagtagccggtatcttggtggcgctacgctgtaaggggtacacctcggaggaactcgtaggtttcgtcgacgggatgatggagcacgcggtgaaggtggatccggacgtcgagagactcgtggatacggccggcaccggtggggacgaactggacaccttcaacgccagcacgctggcggggctcaccgcggcggcggccggcgtgcccgtcgcgaagcacgggaaccgcagcgtcaccagcgagtgcggtagtgccgacatcctggaggccctcggtgtgaacatcgaggcggatccagacacggttaagcgctgcatcgaagaggttggattcggattcatgttcgcgccgaagttccatcccgccatgaagaacgtcatgccggtacgccgtaagctggggatccgaactgtcttcaacgtcctcggaccactcaccaaccccgcccgggagcgcgttaccgggcaggtcatcggtgtgtactcggaaaacctgctggacctcgtggccggtgccctcgcggaactcggggttcggaggggactcgtggtttacggtttagacggtgttgacgagctgagcgtcacctgcgagaacgaggtggtgtacgtggacgacggggaggtgacggatagggacacggtggcccccgaagacgtcggactggatcgagccgatccgaaggacgtcgcgggtgcggatccggagacctcggccgaggaagctcggaagatcctgggcggtgagctgcccgtcgaccacccgaaggtccagatgacggcgttcaacgcgggtgccgctctctacgtcggggaagccgtcgattcgttggagaagggaattcagcgcgcactggacgtcctggaggagggacgggctctggaagtcctggagaaggtagtcgacctctcctcctaacacctcgtaccccggacgatacgtttcggactctataacgattggtgcgggcgggggcgtttacccgccgtagtcctcgatgtagtcctccggcttcgggggctccggcttcagacccttcctctcccggatctcccgaatgatctgctcctccagctcctcgggcacgcgctcgtagccggcgtgctcggtggtccagatcgcgcgaccctcggtggccgatcggatgtcgttcgcgaatccgaacatctcggccacgggtgccttacccttgatgatgacggtatctccctcctgctggatctcctcgatagtacctctacgtccctgtatctccttggtcacggcacccatgtagtcctgcggtacggtcacgtagatgtactgcatcggctcgagcaggtgcgtgtcggccagcagcatgccgccgtagatcgcgcgcttgatcgccgggatcacctgagccggacctcggtgtacggggtcctcgtggatctcggcgtccacgaggctgaccttcactcctcggcacggctccttcgccagcggaccctcctccatggcctcctcgaagccttcgatcagcagctccatcacctcgttcaggtactgcagacccacggtcttgtccaggaagaagttcgtacccttgacggtctcgacggccttcgcgtcgtcccggtccataccgtactccatcagcgtctcctcgagctccttcttgctcatctcctccgggttgaacttgccctcctcgatggcctccacgatctcctcctcgacgggctccaccgtcacgtagaacttgttgtgcttgttcggagacttgccctcgacctcatcgtcacagactccgaacacgccctctcggtacaccacgatcggctccgagaccttgatgtccacaccgcgctccttgatcctgtgggcgatgatctctaggtgcagctcgcccataccggagaccaggtgctgtccggtctcctcgttgatctcgaccttgaccgtcgggtcctccttcgcgatctggtgcaggatctcgatcagcttgggcaggtcctgcgtgttcttagcctcgacggccacggtgactacgggctcggcgaagtgctgcagctcctcgaacggctcgatcggatcctccgggtcggtcacggtctcaccggcccacacgtcgcgcaggccggtcacggccgctatgttacccgccggcacctcgtccgtgcggatacggtccggtcccatgtagatacctacctgctgcactcgggtctccttcttggagctcgccaggtacacctgctgaccctcgcggatcgtaccggaatatacccggcccgtcgccacctcacccgcgtgctcgtcgatccggacgtccgtcacgaccatggccagcttgccgttcgggtcgcacttcctcagcgtcttaccgtcctcgctctccggatcacccggccagatctgctcgatacggtactcctgcgccgtgaccgggtccgggagatgcttgaccaccatgtccagcactacctggtacacgggagcctcctgggccagctccttctgcttgtcctgctgacagtactcgatgatgtccttgaacgtgatcccggtcttctccatgaacgggaagctgataccccaaccgtagtacgcgcttccgaacgccacggaaccgtcctcgacgctcaccttccactcgtccttgaactcctcgggcgccatctgctcgatcatcttgttgacctcggagatgatctccaggaaccggttctgcatctcctccgggctcagcttcagctcgttgatcagtctgtctaccttgttgatgtacagtaccggcctcacgcgctctcggagagcctgccggagcacggtttccgtctgtggcatcacaccttcgaccgcgcatacgaccacgatcgcgccgtccacggctcgcatggcccgggtcacgtcacccgagaagtccacgtgaccgggggtgtcgatgaggttgatcaggtactcctcgccctcatactcgtgcaccatgctgacgttcgcggcgtcgatcgtgatacctcgctcctgctccatctcgtcgaagtccagcacgagttgatctccggccagctcctccgagatcatcccggcgccggccaacagctggtcggataacgtcgtgttgtgcaccacgaacccttcggcggcgaagttgtgatgctcttcgaccgtgaagtcgtacacgtaaccgtcgtactcgacctcctcgacgcgtaccacctccaggaagcagacgtcgtccctggcgagcgccttcaacctctcgagtgcctcaccctcgaccccgaccgcctccagggtgctgatcaccttctcgaggctcgacttagtcaggcccacctggccaccctcgtagttcgagtaacagttgaacatcctcgtggttgggacgtcaccgcgaacttcccgaaggatttccccgctgatcggtaccttctcgagctccgaggacgacgccttctccatcagtttcttcagcttctccgccttctcgggctcccggaagcccgggaacctctcgagcgaccgggcgcccgacacgtacagggtgtaggcaccgtctccctccctgaggtagctggccacgtcgaacttctgcaggagcaactggagatcttccaggaactcccggctcacggaagtcaccgataccgcgctccgaccctcctcgacggtaccgtccgcgtcgaagtacccgcggatgaactcggcgatgcagtccaacggtgccctggtcaggaagtcgttgacccggatcctgtgggccttcttcctcctcgggtagtcgaagagtgcctccaggatcctcgggacggtctccgggaagtcaatccgcgcggtcttgccctcataccttcggactcggacctccagacccatgtcgctcgcgatccgctttacctccccctgaatggcttcggacccgttggtgagctggttccagcacccgtcaccgaacatgagacccgccaggtagaacagatcctccggctcgggcagtcggatgggcttcgtcgacttggtgttcgaccggtaggagacctcgacggcgtcgtagaggtccgccaggtccagacccagctcttccgccaggtcgacgaggatatcggctcgaatccgtccctttctcagctggtagtagaacgagttttcctcgatgtccacctccagcgtctcccatagcgccttgattccgcgctccttggccagctcgagaacgctctccgcctcctcttccggcaggtggacgaagaagtccctgccgagcctgcggaacacctcgcgcttgagctcctcctcgctcatcccttcgtggaccagcttctgggtgcacacgatgtaatctccgatctccagctcgtcggccctcttctcgacgatctcacccgagggatccaggacgaggaacttgtgctccggcgtcgtacggatgctcctaccgttcttcacctcgacctccacgagcttgtccgccttcaggcgccacacgtgagttatcttgccttccacgatctctacggcgtccttgtccagcgaggatactccgacgggctctcttagctcgtagacctcttcactctcatcgcacttcacgagtctgccgcgctctttcagctcctcgaacaactcgtccgctcggacgaaccggccgtctgctaggcagatcttggtctcgggagccacacacttaccgtggtctatatgggcgatgataccgatattacggatcttccccggctcggtcattagtttgcggcacttctcggccatcttctccttacgacccaaaacctacgacccccttatcgggccgcctccgcgatgcgctcgatctcctccttacgccggatggagtggcactccgtatcgtatctcgcggctgcgatgatctcctccgccaagcactcctctatcggtttcgggttgcggaacgcccgctgctgagcgccctccgtaattagccggagggcgatgtccagccgccgctgcggcgaggaatcgacggcctcgtggtaagaaatacctccgtaaatgatcgtggtggtctcctccctcggagcggcgttctccagggcctgcaccagaacctggatcgggttctcaccggtccgctcgtggatgatgtcgaacgccctcttgactatattgtatgcgaggtgcttcttgccggtgttcttttccgtccgcatcacacggttgatcagcctctccacgatcgggacttccgccttcgcgaaccgcttcttggcgtgacgaccgccagtgtgcggtaggtacatcggcttcagacagatgtaatccttcagacccgggtctcgaacctcgacctccgtggggtcccacttgccgaacaccttcatctcgtagagtctgtccaggtacgggttgccctccagctcggagtacaccactcggcgctcctccgtctcagcttcctcctcggttacttcctcttccctctccatctcctcgacttccttggccaactcgaacgtccccttaacgcatcggcttctcgatcttacccttcagcagctcggacagagccacgtcgttcaccttcacgaccttgtatcggacgcccggaatgtctcccttagcgcgacccttgggacctccgataccctcgatgaccacctcatcgtgctcgtcgatgtagtcgatcgcaccgtcaccgggacagaacgcggtgacctgcttaccgttcttgatcagctggacgcgtacgcacttacggatcgcggagttgggctgcttcgcctcgactccgaccttctcgagcacgatcccacgcgcctgaggtgcgccctccagtgggtctgccttttcgtcgagtttcaacatcctacgcttatacctctcgtccttccaccggaacttcttacgcttctcccgcagcttacgggccgcgaactccccagcgggactcttcttgcccggcatgagcgtgagccccctagatcacgtgacgatgatatcatcgataccatggtgtctcctcgcgaggatccgcgccttctttatgttccttccccctttaccgataacccggccccgctcggactccggcacgtccactatcgcgactttcttgttcccgcgctccgtcactcgaacgctcttcacgcgcgccggaaacagggcgtttcggatgaacttctccggatcctcggagtgctccacgacctccacgtccatcccgagctgctcctgaacgcgacgcacgttctgacccttcttaccgatcgctaggcctatctgtccctccttcaccacgaagatcgccctgttgtgctcgtcgtcgatcacgcagtccagcacgtgtgccccggtgaggctctcgaagagcgcgatcatgcggatctgctcggtttccagtttaaccgccaaggtttttcaccccttttagctcggtgcggccccttcctccatagccttgcggaccgtagcgatgaggtcagactcgccgtcgtccaggaccgccatcgaagctaccacgtgtggtctaccgcatacgtcacccagatccatgctcgtgcccgggtacacgaacaccggtacgtcggctagctccgcgtagtactcgatgtcttcacggatttcggccggacagttcgccgctacgatcactagcttgggcttccctagtttcagtagcttgatggtctggttggatcctaacacgacgtctccagtctcgacagccatgcggatctgacgctcaatctcctgcagctccaccaagttacaacaccccggaatgagaactagcccttaccctcgatggtgcacaatgagtcattccgccccgctcacgtttcaccccgcgcggcacggtttccccataaaagtcttactcctcgaccgggtctgacttaagaacttactgcgagaaacaggaaacgctcccccgacacctgtatacgacgatacgcgggctacccgcgacggggcactaccgggctccgcgcgtcgaagtaccgggacggatccttcgagatgcacctatccctacgcgtctatctcgacggctcagaggtggcgctgtgaccacgtccacttatcagcgcgaaaaacatcgcgaacaggtgccgtgaaaccgagacggtagcggccgagctcgggtaccgagttacctccgcgggtacctaccggcgcccgtgccgctagtgggtgtaagcgatcgtagtcccatggggtgatgggaaggaaagcggcccagttcagctctccccttcctcttctccctccttgaacttggagtaatccactgtgagctccaccgtaccggtacccaccggtaccggcttacccacgatgatgttctcgagcactccacgcagctcctcgacgtcacccgacgtcgccgtttcggtgaggaccctcgatacgtactcgaaggcggccttcgtgagcgggctgcccttcagctccatcaccgagtaaccgccgacggaccgtacgctacgcagctcgccccagaacgacatcatgtcgctgatgagcatgaagtggcgcgggtctacggagatcccctggctctcgtacacctcctcgagctgctcgatgatcgcgttccgcccggcctccaccccgaggagcacgtccactatcttcgggtcgttcgtgttcacccgcgtagcgtcgacctcgtccaactgcatcagctgcagcatcaggtaggcgcgcttcgccaccttgctgttcctggcgcgctgggagatccacctaggaggccgtcccggggctccctcaggactacctctgacaaggatgtagtattcctcctcgtcctcatcgtactggacggaggcgtggagtaccccctcgatccccttcactacggcctcgcggaggtcgttcgcgatctcggccagctccgatgccgactccacgtccgcgagcgtcaccttgaggacatctccctcgaggtgacacgccccgccggtgtgctcccggacgaaggccacgagctggtcttcgtcgatcccgtgttcctctatccgctcctcatccaggccgatctcgatggcgcactcgtccgggttcacctcgatgtactccgtgagttcctcgaaccgcgtctcctcgatctttcgcgccactccctcggccttctcccgatcgctgcggtacggttccttgagtctcagttcgatgacccacgtcgggggaccgtgataggggagagaaaggacacgctccagcgccggcataccggtggtgatgtcgatctccgccacaccggccaggtggaacgtacgcatggtcatctgcgtcgccggctcacacatcgactgagccgccagaacgcccaccgcgtcgccccgctcgatctgtcggcacttgtagttgcgtacgagcgcccggaggaccttccgcacggtttcttcgtcggcgtccttgagctcctcgtcctccgacaccttctcgacgatctctcggtgtaccgagtccgggagctccacgtcctcctccttacagacctcttcgagcagctcctccacgttcatcccgcgcctcccctcactcttctctcttcctccagcaccacttccttcacgaccttcagcgccttctcgacgtccaggttcaagccccacttcttggcgggatctacgccgtcttcaccgtacgtcagctggatgacgttgttggcgctgtcgcgcacgcgccctccggagtccacgatcaggtccagggcggtggtcacgtagcgtcggtgtagatagcccgagtccgccgttctgaagcccttgtcgatgagaccctctcgaccgctcatcgcgtgcaggaagtactcgaccatgtccagcccctcgaagaagccggagcggacaaagcctccctccttcacacccgggatgaggctcttctcgaagtgcggtgtcacgcggtccgtgtacgagtagttcactatcttctccatgatatgctccgtgttgtgcttcgcccggtgtggacgctcacccatcacggcctgctgaccgccgatcagggccatcctcgcgatgttggtgatacttccacgcgcacccgactccggcatgatgtacgccgggttgaacaggtcacggtgcttcttcagcagtctctcggtctccactcgcggctggttgaggatggccataacctcgctctcgatgttcctctccaacatctcaccgcgctcgatccggctccggttgcaggtctcgtgctcctcgagctcctggagcctccgctcgccccgctcgatgatctccttcgccttcttagcggcctcgtcacacagccgctccacctcgtcccggaacctctcgtagatgtcctcgaactcgtctatacccagcgtgaacccgtacctcgtcacgaaccggagaccgagtcgaccgatcttgtccatggccctcagtgtggtctcggcggccttgaaccacgggtacgactcgcccctcgctacctccctggccgcgtagcggtggacgatctcggtcatgataccgtggacggtcttctcgtccaggaacccccgcacgatgcgtcccttctcgattaccaccttaccgtgctcctcgtcgtccggacagaccgcgttctccagctccactctgtccagccagtccgggaggaagacgctcagcagctgtcggccggttacgagcggctcaccctccctgggttgcccgcaaacgaactcgagctcgtgtatctcctcttcgaacccacgccggtacttagcctcgggtttcagcttcacctccgtgggctcgaaccagtcaccctccttcttcacctcctccaggagctggtaggcctctcggagcggtatccacgccctcgacagcaggtggataccgacgatcgcctcgtggatggggctgttacggacgtcctcgtgcccgttcttaggcggccacaggtggtacacgtaacaacccatcaactccctgacctcggctcgagcctcctcggactgtggcacgtgcaggttcatctcgtcgccgtcgaagtccgcgttgaaccccactcccatataacacgccgcgggcagtctgaacgtcttaccgggcattaccctcacgcggaagccgagctccgactggatgtgtagcgtcggctgtcggttgaacatcaccgggtctccatccatgagatggcgctcgacgacgtcgccgggttccaggtcttccgcgagcttctccttgttctcgtcggtgatcctgatccggctcccgtcccgcttgaccacgtagttggctcccgggtgcttgttcggaccgttgagtaccaacttccggagccggtcgatgttccactcggtgacccgctccggaacggtcagctccttggcgatggcctcggggacacccaacgtgaacgggtcgagctccggatcgggtgtgatgacggatctggccgagaagttgacacgcttaccggccaggttctgcctgaaccgaccttccttacccttcaaccgctgcacgatacctttcagcggcttgccgccggtccggtgcctggcgacgggtactccaccgatctcgttgtcgatgtacgtggtgacgtggtactgcagcaggtcccactggtcctcgatgatcggctcgggggcacccgcctcgagcgactccttcagcctgaggttcacccggacgatatccacgagcttgtgcgtcaggtcgtcctcggcacgttcgccggtctccaggatgatcgagggtctcatggtcacgggaggcaccggcaggaccgtcaggacagcccactccggcctcgcccgttccgggtggaaacccaggatctcgacgtcctcgtcggggatcttctccaaccacgcgcgtatgtccacgggccacagccgctcgtcgtccatcataatcgtcgtgggcttctgatacgtgatcttcctggattcggcgccgcagtgcgggcacgattcacgcttctcggcccggtctatcacctccgccgccaccgacttgacgggcctgataccttccctgacctcccggaggtaactctcgatctcgtcctccggtagcttgaccctcccacactccgggcacgtggcccgcagtacgtccttgatcctctccgcgtacctggggtgcaggaccgggcgggcgagctctatatggccgaagtgaccagggcagcgaccggccggctgaccgcacgtccgacacctgagtccggggtcgatgacgcccatcctggtgtccatcacgcctccttcgatcgggtacccgtcctcgtcgtacgtctccgggctagttacctcgaccttggacatcttccggatcttgtcgggcggtaggatcccgaacaggatgcgcttcacgtacttgggtggatcttgaacgcgaggttcctccatcagggtcattcctcctcaccctcctcccgttcggacagcgagccgacttccagcacggcgtccatgcagaacgacttcagctcgtccagcagaatcttgaacgcgtacgacatctcgacgcggtcagcccgcacctcgccgcagatgggacagatcgtcttacccgtcgcggcgtgcacgtaacacagctctccgcagttcgggcaaatgtacgcctcgtacttgtcggactcgtcgagcagcctctctttcaggaacaatgaggcgccccaagccacgaggtcgtcgcgttccatctctccgaacctgagaccgccctcccgggcccttccttccgtcggctgcctggtgagtacctgcacaggaccgcgcgatctcgcgtggtacttgtccttcaccatgtggtacagcttccggtacaggcacactccgatgaagacctccgcttcgagcttctgcccggtacggccgtcgtacatgacctccttaccggtgggctcgaaccccagctcgcggagcatcttcttgatctcctcgtaggcctccttcgggttcgaggtgaacgcggaaccgtcgatcctcttcccgctcagtgccgccgccttacccgcgagcgtctccagaatgtgggccatggtctcacgcgacggtagcgcgtgcgggttgagtatcaggtccggtgtgatcccgtcctcggtgaacggcatgtcctcctccgggacgatcatcccgatgactcctttctgaccgtgccgtgaggagaacttgtcaccgagctccggcacccgctcgtccctgatcctcaccttcaccagcttgtgtccgtcgctggtctcggtgatgatcacggagtccacgataccggagtcggtgtgccggatggccgtggaggactcacgcctctcctccgccggcagttcctccggtcggaattcctccaggaagcgcggcgggctcgtcttcccgatgatcacgtcacgaccctcgacgcgctccccgacctccgccagtccatcctctcccaggtgcttgtacgcgtcctcggaccggtatccacgcacctccttctccgggatgcagaacttgtccttcatcccgcccggatacgtccgtgcctcgtcttcgaacgtcttgaagaagaacgacctagccagaccgcgctcgatcgcggactcgttcatgatgatggcgtcctccatgttgtaaccctcgtacgtgagcacggcgacgatcatgttctggccggccggccgctcgtcgtagtcgaaagcttccgtacctctggtcttcacgagcggtcggtgcgggtagtacagcaggtgaccccgggactccatccggatggggtggttcgcggcgtagaagcccagcgcctgccgggtcatgttcgtacccatcgtgttacgcggcgccgagttcgactccggccaggggatgcagctgcagcacgttccgaatatcgccgccgggtccagctccacatgtgtgtacttcttccgctcctccttaggcatcgagtagaactcctccagggactgggcgatgagcgcgttctcctcctcttcggcgtccaggaactcgatgacgccttcttcctccaggtccttccacgagatctctccttctcggagcttctccaggtgctcctccgtgagcttgacctcgccgtcctccaccaccagtagcggacggaccacgcgtccacggtcacagttcacgtgcacctcgttcaggtcctcgtggtaggcggcgttgaccctcggatgcagcacgccctcccgtcgcaactcccggactttctccacgaactcctccgggtcctccacgtatccgatcagccgtccgttcaggtacaccggggttctatcttcctcgcgttcgggacccttgagaacatgctcaacggccttatccacacgggtctccacgtcgtcccgcacgccaccctcctcgttcgacacgggttcggggtcccccttactcggtttcgagcccgatctcctccaggatttcgatcacctcgtcctcatccgcgtctttgtgaacgacctcggcgtacagggccaggttcttgatcgcaccacagttggccccctcgggggtctcgttcgggcacaaccggcccatgtgcgtcggatgcaggtaacgagcctccttcgggatcgaccacttacccacacccagctccgtagcggccctgatcctccgcaagtgcgacatggtggacatccaggtataccgctcgagaatctgggagactccggttctgggccggtagtggccggtcctccaggtaccggtcgacatacagctgcggatgtggtccgtgaccttgtccggacgcacgatgtaccggatagtgggctcacgaccccgggagtacgcgcgctcgaactgatacctcatctcgcgggccagctgctggaacgcgtactcgtaagcctcgtacagtaggtcacccgccagcttgatccgcttgttcgcgtaatggtcgcggtcacggacgctcttcaccttgaccctccggtacttcagctccagcacctcgcgcaccatcttgaggacctcgtcggccttcttccggaagacctccttcagcttctcatcgtcgtccaggtcgtcgacctcggcgatgtgcggtaggaagtacttggccagtacctccttaccccgcttaattcgctcctcgcggctctcgtcgggtctcgacaacctgccgatgtactccagcgcgtcctcctggctgccgatttcctccttcacgagtaccctcatctgctccgccatgatcgtggcgaactcgggaccgacgccctccatgatctcctcctcggtcagtcccagcgcccgtaataggatcaccacggggaacttccggtacacggccggcatatcgatgaccaggcgacccttccggtcgatgacgtccacgggaccgcggtaccgctcgccccgggagtacaccctggaacgaacctcgtccagtacaccacgctcccggatcttctcgttcacccgtcggttcggcgcgatatcctctagggacatcagcacgcgttccgacccgttgatgatgaagtagccgcccggatccttcggatcctcgccgacttcgatcagctcctcctccgacaggccgtaggtgttacacaccttcgaccggaccatcaccggaagctcgccgacgtagacgttgtcccgctcgacctcctccccgtcctcgtacattacgatctccgcgtacaggggcgcggaatagagcatgttcctcaggcgtgcctccatcgggtagatcttccgacgcgcgccgtccggctctatcgaggagggttctcccacctcgatcctctcgaactcgattcggtagctggctccctccacttccggttcgatcggttccatctgctcgatcagctgttgcaggccctcgtctatcaaccagtgataggataggaagtgatgggcgatgagtgggtgcgtctttacatcgcccaggagttcctcgtttctacgtaaataaccctccaataacgccaaataatcctcctcactcagagacttgacgggttcggccatcgggttcccccctactcgggcggattggtcacgacccggtacaccacggtcttacccgcggtcgggctgtctcggacgattttaaccagactcccgggcttgatccgcttgccgagtttctcgctcagcgccacgaccacggggtcgttcgtgtggatcctcggcaggtcgtccttctccaccccgagctcctcgagtatcttctcgatctcctcctcgtcgtcgatgacctcgtgcttcggcacgagcacgtggttcaacaccacgtccggatccaaccgctccgccatgccccttcccccacccgaaggggcacgtttccacgcacagaccgcagtccacacacgaggcctccgagaaccccaggaagacctcccgcacggcggccgccggcggtattatacagtccaccacgggacagatatcccagcacgttccgcagagctcgcagtccccctccacgaccgcacggccctcttccaatcgcagagcctctaccgggcagcgttctacgcacagaccgcaccccgtgcaccgggactcccggatccacggatgtggcaggaggcgctccgcgatgcgctggacgaaggcgatggggcacagcagcgaggccacatcggaaggcagccgagacacctcgacgtcctcacacagcctacaggtcgcgcagaaggcctctacaggccctttccgaagctccagtgaaccagcgggacacaccgcggcgcactcaccgcaggctacgcatgcccggaactccaggtccggccggaactcacggaaatcccgatacaaagtccgattacccggagtatcgttctactcgggattcgccggcccggttctctatcctccaaagctcgtccgcggcgtcctcgagctcctcgtcgtgggtgacgacgatggcttggcgtacgcgccccttgcccagatccagctctcttaaggcttgcgctaatcgctcccggtgttccgcgtccaagtgcaccgtcggctcgtctaacattatgaagggggcgaagctcgaccccaccatggcgagcgccaggcgcagcgccagcccgattataattttttccccaccgctcatccggtcggcctctatgaaatgaccacccggcacggagacccgtatcacggccccgtcgtcctcgatcctcaacgatccgtaccggtccgagagatcctgcaggatcttcgaggcctcccgctccacggcgggcagcaccttctccctggcgacgtcacgggaatatctgaacacctccttgcagagactgagcacctccacgacccgctccaacctctccttgcgctccttcgcctcccggtacttccgcacctgtttcttcaactcttctctgcgtttttccattccgttcagccttcctttgacctcgctcagcttatccctgaccctctcgtacttcttttcgacgctctcgagttcctcctccagtcgatcctcggacccgtagcgttcccgtaacccctcgagattacgctccacttgctctaacctacccttagcatcttcgagatctcgttcgatcctcttcaactccttacgggcttcccgagccctcttcaccttctcctccaggttgtgataacgttcgagctccccctccgcctctcggagcttctgccctacgtgatctcgctcctcctcgaggcgtcgtagctcctcttcgacgtcttccacaccgctcggcgttcttccgattactttctcgcaacggtccagcgtacgttccagttccttctccagccggagcacgtccccgcgccgacgctccaggtctctcagcagactctccgccctcacggccagatcgcgcagctcgggtaaccgatcttcttccacacccagctcgcgcgataagtccgcgagttcctccttgagctcctcgatctcctccaactcccgctcgagctcctcacgacgctccctaagacgccacatcctttccttggtaccctccaactccctcctaaccgactcgagcctatctttcagctctctccgttccttccgtagatcctcctcacgcccttgaagacgttcgagctccttctccgcatcacgcaacaacttctcggcgcgctctcgtggcagtttccggaggcagacgggacactcgccctcggcctccctgagactctcgatgcgttccaggagctccttctctttgaccctaatctccttcagttccccttggatctcgtcgagacgctcttggagctcctcgtactcgctctgcagcgtctcctcccggtcccccagctcgcttaactcgtcggagactttctccagcttcctcttgagctcctcttcacgcctcaggtcacgtaaccgttcggaagcctccacgatcttgtctttgaactccaccagacgctccggatcgaccccggcttcatccttcagctcctcgagctcccgcttcacaccttcgagttcctcctcggcggactccaacctgttccggagactgcggaggtcgtccaggaggttcctcagctcctcgatgcgtctccgtagttccgcctcctcgttctcgagctcacgtactttggaaggaacatcacccagtctctgcagctccctctcggcttcctttccttcttcgaccagcttccggagatcgtcacgacgtcccttaaggctctcgatcttgttctcaagcagtcgtagctcgccttccagcctctcgaactctctcttcgcctcgcgcagctcgttcagtcgctccttaagctcctcgacctcgggctccagctccttcacctctcgtttcagctcctcgagctcccgctcgaccctcttgagctccttcttcgaccccttcaggtcgcggacgcgctcgcggaaggtctcgagcttggcttccgccacccggagcagctcgtgtgcctgctcgcgggccttcttgaactccgccaacccgagcgtcctgtcgacgatcctcttcctctcctcccgcgtcgcttccacgagcttcgcgatctcaccctgcctgatgtacaccgcctcccggaacacgtcccggtccactccacccagcgcgttcatgacctctcggtcgacgtcctcggcccgccccgaggccacgaccttccaaccgtcaccctcctccctgtacagtctcgggttcctctgcccaccgccccggtagaactcgcgccgcaccttgtacttgtgcccgtccgcgccccagaacacgacttccaccacggccctgcgctcgccctccctgatcatgtggtcgtagctccggaacgtgcgcgggaagagggccagggtgatggcctccagcacggtggtcttaccggcgccgttcggacctacgagtacgttgatgccctcgcggaactcgatctcggtgctgctgtgggacctcaggttctctatcttcacacgctctatcattcgaccgtcacccgatccagcgatccagggagggtcggccggaggacccgagcttcgatcccgcacgactcatcccttcggacgacgtcccacggctctcgaccttcacctcctccacctcgagacctacctcctctccatcggattcttctggctcttccgaggactcctccgaaccttccgacgggggttctcccgcgacgataccttcgacgtcccccaggtcgggagggttgtcctcccggacgcccctcaggatctccagcgccacctcgaccaccacatcgtccggcacgtccacgcgggtcagggtcgcggccctggcccgcttcacaccctctcggattataccctcgaggtccagcggcccctcggtctcgtcgccttcctcgacctcgcgcctccgctcccggagctccaccacgcaccgatcggccccggcctcgatggcgaccttctcgacctcctccggggacgcacccgtgtccttggccaccaccttcacgatctgtccccgtctgacccttcgacgcagctcctcctcccagcgctcgccactgacctccacgaccgagagctcgcggctccactccacctcgacgaactcgtactcgacgagcccgccccggtcgaactccacgaggaagaaaccgcgccgcttgtgcgcaccgcgctcgtccttgacctccaggaacgtcagcggctcgggactcccggggtagggcgccggactcccgtggatcttctcctcacgactcgggacgtggacgtgtcccatcgcgtagtaatcgtgcccctccgggaagtacgcgggttccacgatctcggactcgtcggggatcgtcccgggtagggcctgatggaagatcgccacgttgacgtccgcctcgggatccggcctgtacttggccctgatgaccttcgccctctccacgaacgagttcttcggcaggtactggagcccgtggaacgtcacgcgtacgccgtcgaaggtggccgtgtaccggtgcctctccgggcgccgttccgagtagtagaggtgtcggaccaatcccatccgctccaatacggagataggagaaacggcccctttccgccggcggatctcgtggttgcccgcggtcgcgacgatctcgacgccgtcctccttcagctccgagagcttctccacggccaggtatagggcctcggtcttgggccgcgcgtgctcgaagagatcgccggcgatcacgaggacgtccacggagcactcgcgaacctcctccatcagccgctcgaacgtctccatcacggcctcctctcgggaccgcaggttcatcagggcgtggcccaggtggacgtccgccacgtgggccatcctcaaggtcagatccccaggtccaggtcctcctccgcatcgtcctccttccaccgctccacgatctcgcggacgtccggcgtctcgccgccgtgacgggtcatcctgggtctgacgtccacgaacgccgggatccggatcgcgctacccgtcacgaacgccgtgccggtgggcaaccccttgatccgttcgagagcttccctggtgatcccctcaccgctcttccggatgttctccaggtcgtccgggttggccgtacggagcacgatcatggtgttacactgggagagcacggtcgtgtccacgcggcccggccgctgactcacgacgcacagtccagccaggaacttccgtccctcccgcgcgaagtctcggacgacggagagcgcggtcttggaggaggaccgctcctcacccgccggggcgaagttgtgggcctcctccaggacgacgaacacgggcgggatctcgtcccgctgccggagctcgaacaaccgcctcaggaagtgcgtgaccacgatctgctgcgccctgtccgggaccccgcgcaggttcaggaccagcacgcgacccggacgcacgtgccgcctcaggtccggcgactcggccatgtcgaagatcccgtacctgagcagcgggcgcaggtccctcaggaccgccctcgccgcctggtactgcaccacgtccccgctcgccctggcacgcttcgcctgtgcgtcgagctcctcgaccacgtcctcgagcgagtacttctcgcctgtctcccggtacctgcgctgcagctctttcacgacctcctccagcacctgcggcgccgcctttcgcttcgacagctccggggccaacacctcgaagtcgtccacctcgagcttggtcgtgtcgatcgtgatcgggtaatccttcacgccctccgagtgcgggggcgcgaagacctcgacgtcgtccagcccctccggctccagcccccaccgctccagtcgctcccggtcgtgcgagggctcgcgcaggctggtgtactccccgtgtggatcgatcaccacgaccgggatgtcgtgtcgggccatctcctcgatcaacacgcccacggtgtagctcttaccgctacccgtcatcccgagcacggcgcagtggagcgtgatcagctcgttcaggcccaggaacacccgcgcccgggagtccttcaggcgcccaaggaacacctcgcccttcgagaacagctcctccagctcggactccggcagccggtagactgcgtccgtgggcctcgcgggcatcctgggatcacggagccgcccgtcctcgagcgcccccagcacctcgacacgggccacgacagtccagtccagctcgggcacgggccgcccgctcaccatcgaggccttggcgatctcgcccttgatcccctcgtgcacgtcccgacgcacgtcctccacgcggcccaggagctcccgaccgtccgagtccggctcccgcacgaccacgtaatctcccacaccgacgtcctccgcgtcccggctcaccacgaacgtgaactcacgcacggacgggctctcgtagacgtacccgacgaccttacgctccaccctcctcacccccgtgcctcaggtggatctcccgctccgcctccgcgctcgacctgcgcttgggacgtgactcccgccgaagcctgcggaacaccgtgaagatcacgtcgaaccgcccgtccgacgccagctccgtcagaacctcctcctctatccagtccaccagcgacctacccaccttcgcgaactcgtcggccatgaccagggggagcgggatcccgtaccccccgtactcgatcgaggttcccaggacgataccggccgcctcgtccgggtccacgaactccgggatctcaacccgaacgggcggggagtacctcgtggtccgcacgtagaacgtgaagatggagtaaccggtggcctcctcgaactcgcgcaccacagggtagtcctcgtccgggagctcgaacgcgtgcgtgcgctcgccgacctccaggaccgggcccccgtcgagctcacgggagagggccacgggatcgttcggaagggccttaagcgggaggtcctcccccaactcgtcccgcacgtccctgagcaggtgcttcgccttacagtcctccacgatacccatcacgacggcgccctcctcctcacacacctccagcatcgtccggcgagcgtccaggattcgaccccagtaatcccgacggttcgggctgtcctcgttcgcacccttcagatcgtgatgtggcacgatcgggccgtccagcatcacgacctctccaccgcgctccaccgccctggtcgctacgtcggactccagcttcacgcgcctcgccgccaccctcatctgcggtgtcctcgtcctggagaggacgccgaagtcccacgaggagagcacgtccgcctccgaccaggccgccgcccgcgtcacgtagagcacgacgccctggtactcacgcatcccctctccgccgtccacaccgaacgtgacctcgggatccgggtgttccggctccacctcccgcttacgctccgccacgacctccagcacgcggcgtaacaccgggttcctgccgggagagacccgccggtacacgttgatcacgtcctccgccagctcccgccgacgccgcgagatatcctccagcagccggccgtaatcccggccgcgccttacgcgaccacgctccagaaaccggtcgagctcccccgacaagggcgacgttctccccgttcactccgacgtttccctccgccaggtcggtgtcgataactaccttgcgggagacaaaacgttatggttctcgtaacaatttacgattttggcgccccggccgggatttgaacccgggtcccgggctcgacaggcccggatgatagaccgggctacaccgccggggctctcatccctccataccgtcccacgttccaccccaattataaactttactccttagtcctctccacgaccaccttgatcgactcgcctccgctgacttccacctgatagttcgcccacgaccccttcacggggttcgagatctcgctgaccgacttcggccgcccgtacagcgccacgtaaacctgcagcaacacgttacgcctcagcagatccacgacgcccgcgggattatctccggagtacttgagctcgtattcgatcctgtcatcgttcacctggcacctcaccaccgacaggtttcccgagatctctacctcctgatctcctacccgataggtgacgcccacagccacctgctcccgggtcttcgcgacggcatcgctcacagccttcttcacgcagtaccactcgtactcgggccccatgtaccggcccgcgatgaacgccgcagtcagcacgatgatggacaacagtacgaactccaccgacacctgaccgaacgtgcgcgcgcccatcgggggctcagcccccgggtggtatcacgtacaggccgaactcgaacggcttgcccgaggtcgaaacccaccattcgtcacccggaggccactccgtcacgggcgtgggtaccggatcgtccactgtcctcggatctatcaggacaactcccggggttctgggcggccacccgccggatggccacccgaccaggatcggtacgctagccgtaactcccaccttcttctcaaaccgaccaccgagccgcaggatcaccacgatctcgcccggaccaccgggctcacccttcacccggaccttgaggtagtactcgctgttccctattttttccggcaggtgtatctggttcgctgtgctctgccagtcagggagccagctgatcgtaccggcgatcgcgttggcgacgtagttcgcgatgtaccgggcctcgatcaacgccatcacgtccgacactccgaggaacgtgcccaccaccgagtacgtgaagtacgcactgaggaccaacatgatgaggagcaacgccgcgaactctatcgtgacctggccactaggcgttgcggagaaccagcttcggaccctcaacgacgctcacctccacgaccccgggtaccgtcacgttctcaaccaccacgtcctttccgaacgagtagaactttgcgacgcctttaacgccgttaccctccacgatcacgtagtactcgtcgtgctgcccggtcggttccacactcaccgtgtagctcccttgggtaccgggtctacccttgatcctgacggtgaaccttgtcccgacgtcgcacgcggcggccttgtcgagcaccctggccagctgctcagccatcgccttcgcctcgagggcggacgcggcctcctcgacaccgcctgaaccgtacataccttccttcacgaacgccatcgccataccgacggcggtaacccctatcagtagaaccaggaggtactccagtgaggcctgaccgcgggagaaactcataaacaaagtcgggtaacccccagtgtggggttgtaccacaagttgcccctcttaaaggagcgtggccaggtgttcactctggacgcgatggcggcgctcttgctctccttagtgctagtgtccttagctttggattatattcatatggttagctggcctaccatctcgcctcgtcaggaggtctcctcgatcgccgtcgtccagcccgtgaagtggggatgggtagccaccggcgtgtacaggggcgagctcccgcacctggaagtcaaggagatccgtgtcacggattggaacgtaaatggcaataagtggaccgcgaaggtcgacgtttcggataaactcccaccggacaagaagatcgtgatggcgttcctggttctcatggtcggagacaaccacgtcgtcgacgcttacgacccgaacgataaagatctaggtgtgtacgtcgaggtgaacggtgacgagaacggtgaacgcgtgttcccgacggtcccgatcgactggaggggcaacatagggtggtggttcccctacaactacaacggtcgtatatgggagaaaaccctggtcgacctcaccgtggacgatcggggcaacccactgctcgttaacaaaacctcggacgacaacatcagagtgcggattggcgtcaaaattcgaggttactggggcagacaatacagggataaaacacggatagtactcgtgctcgccccgaagcagttcgacgtcgccgtccaagtctggcgtccggacggccctcagatcggcccacagccgtacgatgaccgcgatggtaagactggaataccggtcaaaggctccctagcgactgatctcagcaggaacaagaaccctgaccctgtcacgaacttcgccgactggtacggggaagatgtggacaaagatcggctggaaaatcctgacgagaaccccgtaatcaccgtcaaagacctggttatgagaataggtagggtctttggtaactggagaccgtggactccggtgggaaccggtccttaccgtgagtattacgataaaagtgatggaaccgtccacaaactggaggacgcgaaagacccgaacggtgacggggccgatggtatagtcctgacgcgtcacggtgctcagatcgacgattcgtaccatctgttcgcggcgtacgtgatgatgcccaggacgttctcgtctgtatgtccgctggacgctccgatactcgcgttaacaacacagcgtaacggtccccccgagttcgtagtgtacgctaacgtcagaaccccccaagatatagcgaagatcgactgggctaacgtggacgagtcgttaggagcgtccaacataggaacgaacaccacctacagatggaataagactgaggaccttgacttctacaatgacgagctgaagtactacaagtactacgatgactggtactcgaggagcataggcattccggccgattacctctacggtgcttcgggatacagccacctggtcgtgatcgaccccgaagctcagtggcccattactcccgcaggaggattgataggcacatcgtcgacggtcgagcaggtgctgaggacgcacagtgtcctgtatgcgtatctgaggttaccgaacaggagtcacggagtgcacacgcacttcaactacgacaccactcatggttactactggtacttcaagttccccggcggcattcccgttcagggaggccctcagccccgtatcgtggccatctggattaaggcgccccactggctctaccagtgggctccgtgggccgactccgtgagcgcatcgcttggattcgccaataccaggttcaataacgtccccggtgacggccgcagcgacgagctcgatatgaccatcaacatccagaggccccccgacatgccttcggtgatcaagaactgggcagttcaggacgtgtacatgttcggcaacctggacgaggatcccgacaacttctggatctacatcgatgatgaggaggtctggcccgacgattgggttcccccgtcgatcgaggacctgaagtcgctctccggtggtaagatcgccactccgggaacccacacgatcagggtcagggagtacgagcaaccgtctcctgaggccgtcgaaatcggtccgttcaacgtcctagtcctgtacaagggcaccatgtacctgtacctcccccgcctcaagaggagcaaggaggacgccgtgaacgctctcaggcaggagttcgagagactggggatcgacccggacgatcccagggtcaggattacggtcgcgccgtctcggggttacgacaagccccacaagttcagactcgtagcctggcaggaagaacgcgtactgtacacacctgagtatctccgacggctatcgaccgaagccctctctcagctgcagtcctcgggtgccctcagctacgtggccatggagtgggagtactaccaggacacgggagacgcaacgaagctgcgtcgggccctgcaatcgttacagccattgctgagctccgtcctgggagtgcacttcaagctggaggtctgggacgagaagaacaagcagtgggtgacgctgctcacggatcagggtccagcgatttaaaagcctgcggaccatacctcgtaaccgagcgccccgaccccgtgaatccgagctcggtaaggagatcaccgccgcgtcgtggcttgctcgtgggaaacctcgcgtcttcgaggtcagctaacaaaggtgaaggtgtgtgttagggccacacccggatgactctgccgttcttcagcaccatgtccgtgttggtacccggcagcaggaaccacttcagtatgtcggcacccgggagcgcgaaccccttcctccggtccgcgtccgtggccagctggagcccgatccccgccaacaagctgttgatttgtcgaaccacgggatcgttcgagttgaagccgtacagtctgaagagtcgcaccggctccccccgatcgtcgtaacgctcaggcggtccgaactcactggctcgaactccgtttatcactcctctgagcttaccgctcctcgacgccaacacctccatccacgccatccagtcgacggtcccgaagggaccgtgtgcccacacgtccacctcctccgccggcagcgcggggatcagcgtctccataccggcctcgcacctttggataacatccacatccgggtcctcgatgccgtcgaccgagaccacccggttactcgggagcacgtacagtatccccgcggccctctcgatgaagttcgggggccgacccacgtcgtcaccgagcacgttctccctggtcgggaagtaaggaagtatcacccactggctctccgtctcaccgtccacctcgttctcgttcaggagtttcgtgtcgtcccaggggagcatcttgcccggtatagagagtacgtgggccagcctgagcttgtcctcgtcggcctcactgttcctcccgtcaccgttcacctcgttcaggtacgccgagtagaaccttatcacgtcggactgccctacccgttcccctccgatggatccgccctgccccacggccacctgatagttgcccatcacgatcatcggcttgaacctcagcgggccgtcgccccaccggtccttcgagacgtagtacgcccagatcgggagcggatcgaacacggccttgttttcgttccccgaaggagcgtatccctgaatcgaggcctggacggtcgtctgtccgaggtggaggttgaattgctcccatcccggtacctgcgcgatgaggtagatgtcgaggtgcacgtaaatcgtgaacgggtcgtgggcgtcgggcacgatgggtgtcctgctgacgtccttgggatcagagcgcccataccaagagagccttactttcggatgttcgggatcgctcgtgtcccaatacaaactcccatcaccaacgtagcacctgggtactatccacacctctgccccttgggtctgcttgatcgagtcatgaacgtccaccgcgagcttcgcgagctcgtagtcgatgtagtagcgcagcgactctatcacggtgcggtacgagtcgtagtcccctttcagccgcccgacgtcgacgatgtcgtaaggtgcaagcagcccggtgggcgacgccacccactcgatgttagtacctcccgcgtggacggcgatacggccgtatcggtaaccgttcttctcgccgcccggcagttcggtcccgttcaggaagtccacgacgcccaggtacacggcccggctcagctgctgatgcgtcatggagagtatggcctcgttgatgacgggcttgatgtactcgcatcggatcaggtacccggactccctaccccggtacgacaggtacgaaacggacagcagcaacaaggccaacgctagtgccaccgccggagtgaacaggaaccccctctcccctcgggggatcatccggcggtcacccctacccggagtttcacggggaacagcccggccgtccactggttccagaagatctcgttctccgacccgctcagggtgacggtgaacggcctccctccgatcgcgatgatagtcagggacagtcccgaaccctcaccctccgccacgatcctcctgacgagctccacgggatcgtcggtggcccaaccggacgacgagtagaacactatcctgttgcctcccgagttcatggagatggcctctcgggctagctccttgtacgcttcctcctccgacaaccccgactggatcagctggttgtagcgcttgtgcagccacctcacccaaccgtacagcccgtccccagatacggtcacccacaccaccttaaccccggggacgtttccggagtagctcaccgtgttcccccagacctgcggtaggttctcgtcgtagacccacgtatctccacgcttcaccaacatgacgtcgtaggacttgaccaccgcctcgcccgagacgttcagatcgtcgttgggaaagaccaggtccgccatcatccggccgtcgttcaccttaatgggagagtccagcgagccgccctcggagtagcgcgtccacttgtacgcgtcgacggccaggtacatccggacccccgtcctcagcggcgcgcctccccaggtccactgcaagggctcgctccacagccacacgatgtcgtacgacgttagattggctcccacccaggacggtgaggtcaacgaggccgcgaacctgtccaccgaagcgtacagctcgtaggttctaagggaggtgatcccgtgggctgtcaccacccgggctacgtcggtcaccaggagcaggatgatggcggatataagtcccgcggcgagcgcgtcgacggtgatctggcccctcaaggcgtggccgccctccgtactacctcgctacccagctccttcatcccggcggcccatcccgagcccgtggtcgacacgaacccactgtttgaagcgttaagggcgatacctaaggcgaacacggccgctatgacggtcatcaacagtatcgtccactcgaccgacacctgaccggagctacatccatttcgtagcgagctcgtgacaaacgttggaaatcttctcgttttgggctcgggcaacgtcgcccagccccgaagaggatttcttgaggggcatataatagcctatgaccgccgccatgatggcgacggcggccacgagcactcccaacaccagcagttctatgttggcttgaccgctcacagtttcttggcggacgaggcgaacctttcgaacccccctgagacggccgatcccacgtccttcagaccctgtttcccaccgctgatcggtaaatagtacgcgatgacaccgacggctatggcgcatcccgccacgatcgctatgatcaggaggtactcgacacctccctgccctctcacccccagagccatgacagcgggctcccctgcagcatgtaagtgaccacgtacccggcggcgatggccggtgcgaagggagtggtgtgtcccacccttatcctatctatcccgagtcgtttcaacttttcgagctcctcctcggtgaacccgtccccggagggcacgaccacgggttccgccctaccggtagcaaccagaagcgcgccttttaacctaccgacacgctcggtcccctcctccgttcgaaccacgatctccaacgggatctctccttccctcagttcctctacgttccgttccttcccagcccatcggtacgtggtgaaggccgtcgagagggccacggcgatgcccacctcccagaggacggcgatcggagacgccctgaggttgagtaaaaccgcggggacgacgagggcgggtaggacgatcttcagcttggactcgtacgacctggcgaccttccagaccgccaggatcaggaggatgcctaccaccgaggagatcacggtccccaggatcgtcgccacgcctccggcgatcaagctcgccagaaccaggatcgtggtgttcaggcacaactccttgaggaaggggcgcccacggtccagcgccgtactgacggtcaggtacaggagtgcgaacggtgcgtacagcaggatcgagttgaagaggacgtcgatacccgtcgtgatacgatcgcctcgatggaggaagagggtgagggacggtaggagcttgacgtcaccacctcccagcacgcccagcacgttgaggacgagggtcaccccgaacgcgactccggcgtccaacagtgcgtaaccgaggtgggacggatcgatgaccgcggcgtagatcgcccccgcgacgatcgcgggatacgtaagccggttcggtacgatcccccacttgaggtcggtgatcgcggcgaccgtggcgaccgccagacccgccaagaagcccacgtccatcgtcgctaccccgacaggaccgataggatctcgttccacccctcgatcggcctgtcctgagcgagcatcctgatgcccctgtcgatggcctcgacccgccgcttaagctcctgtaccctgagccgttcgtcttcctcctccatctcgatctggaagcgacgactcagcttccgaagggctccgatcacgatcggccgcttggagacccgggcgagcctctccgtgtactcgctacccagctcctcggcgaacctcttacacacggtcagaacccgttgcgggttcctgaagctttcggacgccagatgcgccaggatcagttccctatccccgacctcttcgctgagctcggagtggagcctccagacctcggataaggcggtcagtaggaggtgttcccgttcggtgagtataccccgatcgttgaacttcgcccgtacacgaccgtccgcttcctccaacacctccgagagcggcgcaacggacagcgagctggctatcttatccacgatcttgaagtgtcggttcccggggatctcggacccggagcggagcaccacgacgtcgtacgagtccagcctgctcaacaccttgtttaggaacttcctgtccatgacgtcgcagacgatcggggcctcggtgacctcgtacagcctgcccacgcgacccttcctgctccagccggaactgtccgcgtcgaacccgagttccgggagcttcctcaacagcgccttgttcacggccaatgccggtgcgcggaagcattctccgaactccgaggacaattcgatgtgtgcttgagcgtcctcttccggtacgtacgtgagcggtacgtcggaatacgtggtacagtggatgtcccagtccaccgcctcgagcgcgtcacgcatctccaaaatcgacaaatagtccgtaaaaaccgtgaggtgggcgtctcggggtaaggctccgagcctgtggtgtcctctctctccgaagagatccaccgtgatcaccagtttcacgttcagacctccgtttgagcgttggtccggcggtcttgggcgtggttcacgtagtgatcacgaatcacgtgatgctgttagcatacgactgtgcggcgctagacgacgcctttgtggcggcttcggctgccgatttcgtagctccgggtggtgcggccgactcgccggccgcgctggcgaaactccaccagtagtacgcgactaggattcccagtcctatgagagccgcgatgagtatgaggtactctacccctccctgcccctccgcaccggcggacactcttcgaatagttttaattattctcctagcgggcaactctcacaccaaccaaccgccactactgacgtgacacctgtcgaccgaccgatcagtatgaatagagaaagaaagataatttaatctgccaagggagataagtgctggggcgtggggtcgcctggattgctgggcttacgagatcttattcgcatacgtcgacgccatttcagtacccttcgacttcgccgtgctacctgccgtcgaggcgccacccgaagctgacttaccggctgcctgcgctgaggtccaccagtagtacgcgatcaggattcccagaccgatcagcgcggcgatcagcagtaggtactcgataccaccctgaccgcgctcagactttacgaactccttcagagcgcgcattttacccactccccgggagtaaacctactccttttcaattttttaacttttctctttccgattcacccgacgtgcgtcgttctcagtatgttataccctagaccacacttccgtagccttactcgcggcgacgttaatcgagtacgatccggtctccttggcggccgtcgcggtggacttggaggaggtccaatagtaatacgcgatcattatcccaagacccgcgagagcggcgattaaaataaggtactctataccgccttggccggagctcctcaattacattccccctgctgcgaggaacgatggcatcaccgacactatcgccaagtacacaccggcggcggcagcacccaacggtagcccgaataccaacccccttttcatgtttccgtacctgatgattcctattgccattcccgacaacaaccccaacacaagcggatacgaagccagaggatccttcgcttgaaggtacatcgggagcatggcgtaggtggggcccatcctctccatcatcgccactcctatcacggctccgatcgatactccgactgggagtcctgaaataagccctcccagcgccagtgcgaggcagggcatggtcgtgatggctttccgttccagttctatcctacgcacctctcggatatcgttttcgacggcttcaagcacgtcggccagcgctccaccggacatagagatcctgaccgtcagacggactgcacgtgttaggagctccgaattcacgcgctcggccatgtccaagatggcttcctcgaacgttttgcccgtatccatatcccggacgactatccggaactctcgtgatagttccccgtagtccgactcggctacgttccgaatggtttcgaatatagaaagacccgcgcggagctcctctaccatttgtcgtagagcatctggcaggttttcttcaatatctttaattctcaaactctgaactatacgggggtgtattaataagtataacggcattactgcgagtaagaacgcggtcgatcctagttttggaattaatggtcctgagatcgacattcctataagtacgtaaatgagtgatgcggatagatatatctcatagggtacgtcgatattgcttacttggaggagataatccattcttctaaggtattcaggagacatgcgaatgactaaaattcgggctagcggtagtgcgagtggatacaatatgagtacaattagacgtatcacaggtcctatattcctcaacatcggtagcagtgggagcacgataatggccccctaaaccttaggctccgccgatttgaatatgaacaggaatatccccgccatcacgccgaccattcctgctatcattggcccgaatagaggcggtggcactaggaaggccccggacaggttcgccgccaggagcatcgcgaccgttacgagggtcggtattacgagggtcagcattatgtacgggaacgccaacgcttggagtttgtgtccgtactccctgtaacgttgacgtagctcgtgggcgatctcatctgcgagggtcatcaatgtcttcgcgatattcgcgcctgattccatggcttgggtgatgaatctgaccatagttcttagtccatctacgttccatcggttggccatccgctgcaaggcgacattaatcggggttccgctgttgatctctcggattaccctttcgaactcctcggagagcgctccgtagtcggattccgagatactcttcatggattctataagcgacagtccagccgacacctcggtggccatttggcggatggcgtacgggagttgccgcgcgatctcgccttctcgtcgcctgatgaggatagtgaccatcatcctcggtaccaccatgcccaggaggaagctcatgatcgggcccagcaccttgagcggtagcggtaacgggaagagcgccgccggaaccgacgtcaaaacgactcccatcaagccgctgatgatcatgaacgtcgcgaaggccgcgggagatatcctgagtccggccttctgtaggacctctctgtcgggtgccaatcccctgaacctgtttccgagtgttgggctgagggactgcaccatttcgatcaacgtttccaggacgttagcccgctccctgcacagcctgcgtagcctctcgttgatttcctcggcggtccggtcccgctctccttcctcctctatgcccaggactatccgcttgatcttctcgacgtcctctccctgttccccgcgtaccgcgtgccgggctgccctgaccttggccgtgagactagactcgagacgtcctcctaacattctgctcgtactctcacggagcttctcagctagtccagagaacgacggtaagctcagcgggagtcctccacccgccccggacggtgtcgactcctttaccttctgtacctgtctagttaccatgaacacgacgtactccgcgtacagacctacgcgttcagccactcccgtcacgtagaggactaccgcgccgccgactcccacgccgatgatcgtgagtagagtctcaggggacgggagcaacgtttagtaccccgagatgcccaccttctccagcaccgactctctgttcttgtagaactcgtgtatgaactccccgacctccctcacgtgcctgatattattgtcgaccaagtacttcaagattcgcttacgtatctcaatttcatggagtatttcgtccatactcattccggttttctcctgaatcttcttgaagaccatgctaggtacttcggtactcgtaacctcatcagtttcaggcttccactcgaacaccgtgttcagctggacggtgtcaccctccattccggcgatttccgagatctccgtgatacgtcgaattgatccggacccacgctggaggaacctattctgcatcactataatgtcgagcgctgggatcataatctttgggacgttcatgggttcattggtgagtctggtgatagtttcacgagctgtgttagcgtgtaaggtacccatacaaccgtcatgtcccgtattcatagcggtgaacaatgtacgtgcttcgggacctcgcacctctcccactataatcctatcaggccgctgtcggagtgtgttctttacgagatcatccatagtaatttcgccacgaccttcaacgttaggtggtttggtcgtcagtcgtacccagtgttcgtgaggaagttggagctcgagagtgtcctcaatagtgatcactctctcctccggagggatgaaaatacagagacagtttaaagtcgtagttttaccactacctgtacctccagcaattagaatgttcgccccatattcaacggctagccacaaatatgccgcagcttcataactcatagttccaaacttgattatgtcagttatcgtcagtggatcctctctaaacttacgaattgtaagcgtgggaccgtccggactcaccggagggatagtggcattcactcgactgccatccggtaaatgcgcatcgagaagtgggttttcctgatctattcttcgacctgattctcgcgaaatccgctcgatcaccgtgcgaattgaacgtgaagtgactcggaaattgcatagacacattccatgatcacggtcatatacgtaaatgaagcaatgcttggcagtaccaccgagtacgacctcaggtactaccattatctcctctagattgtcgtctttcaacagcggatgtatctccttgtacccaaccatttcatacataagtaaatgggctaaatcatccttaacaacttcaagttctgggtactcctctaacactgcgtcgaagttctccttcactagctcgacaaacgccttttctctctctttaagggtcgcgtattccgtcggatcgaagtcgatattcatcgatagaatatccttaatctcgtcaagaactttccgaaactcttcgtcatcacgggcgtacggtggagcctgtgatcccaggcgttttagaacttgtgtcctaatacgttcgaagttgtagtactgctcgtactctttcgatatgtatactggcaccggttgatccgggtactccacgatcctgcggatgttgtcgtcacacagtatcttcccttcccatccctccctctccgccagttcgtgcgcttccaggacctccgcggctttctcggatgacagtggggagatcttcgattcctcagcctcgtagtgctctccactggcttcggcggtttcctcgacggtctcggggctttccgacttcgactcttcctccttctcccctaatatgtcgcggaggaggtcgtcctcctccaggcccccgatcaggtctttgatgttccttttccggggcaccgtccacaccaccttcggtgttatagctccaggtccttaagtaggtcgtctacgtcttcgatgtcctccgtttcttcctcaatgatctctgtctctcgctcttctttcccagtttcgggttctactcccacgccttcggtggtctcttcctcctcggcgccttccatgagctcttccatcgtcgttgcctccgcgaggaccgaggcccggaacgtacccactacttcgacgtcggtgaactctatgccccactcacgcaggagactgatgaaccgtgtcggggtcgttccctccaagtccacgtatacgtcggtccccatgggcgaaaccgtacggacacccggaattttctcgatctcgttcacgtcctcttcagtcactcctttcaccactatcgtcgtcaccggaacctccgtctcctcggtgccgaacttgtcgaggtccgcacctttacgctgcagggtcaatacgatgtgctttctcagcgccttctcgacgatctcgccgtctatgacgtctttaccctcctgaatgcggatcgcctgggcgagctgtgcgatgtctcgggcgtaggcgaaggtaggtttcaaaccccagcctccctcttcttcgggcgtgaacgcccggcggtaggtctccagtgcgtcctcggtgtattcctcgcccatctcatcaagccgctttctgaacaggttcacggcttcttccaggggtgggtgggacagatgcacgaacaagggggcacgacgcaggtgcgcctcgtcgaacaccgtgatcggtaggttcgtcgagaacgccgcgatgaagtcgcagaacacctcgaccgcggtgccgccgacgtggacgatgtccttcttgttctccatcggtacgatcaacctgttcaggatggcgatgtgagagtccctctgacgccccacgtcgtccacgaggaacacgccaccgtgggctttcacgtgtggcggtacctcgtagacgcccttctccgcgtcgtaccgaccttggaggtcgtcgagggtgagttccgcgccagtgaacacgaacggggcgtggatctttacccagcgctcgtccccgggctgctcccgtcggggcctcggctcgtggaagtccgggtcgtagagctgcagcacgctacccgccacgtacacggctttcgggatcacgatagggggtagtaacttcgccattcggctgagcgtgaacgtcttacccgtacccggtggtccgaagacgacgagacccctcccgctggtcgccgcgaggtagtacgtccgcttggcttcctccgctccgattacgtcgtggaaggcgtactcgtacacctcctcggggatctcgatggggtatcgaccctccacttggtcccctacaacctcttggtacatgtcgtaggggacgggacacacgccgatgtacgggtcttcgctcatgatgttcgcggccagctcgcgccccttaggagtcacgtcgaaagtggtgttctggaacatcggccctccaccggtgtgacccaccaacttccgatcctgaagctcgtcgacgatctcctccaggatggggatcggaatccgtgtgacttcgtagatctccctcccttccaccggtcctcggtccgcgatgaccttgagcacgaggttctcgatgtactcctcgggtaagcccagatcctctatcgatttgggtttggccaacgactccactacttcgactatttccggccggttgtaatactcctcgacggccttgaggatctcggggggtaggtcctcggccaacccgttcaccccggcgcccgaagtacccagtaaccccctcccctcgcggcgacctccgccgacccgaaaacagtacgcatctcagacaaaatccttttcgagcccattttacggcgaaccaccagccaaagctcgccgtcttcggttagatggttcggagcttctctcactattctcagaactaagtccaatccctcgcgaatgggtgggttggacacgatcctgtcgaactcctcatcctcaacgggatcgtagaggctaccctcccgcacctcggtgatatcctccacgtcgttcagccgacggttctcattcgcaagccatatagccctccggttcacgtccgtcatcaccacgtgcccttctcccagctctttggccgccacgatccctaaaactccgtatccacaacccaagtccaggacgctgtgtactccttcgaggtccatgttctccgcgagaagttgcgtccctggatcgatcctcctccacgagaacacgccgggggcagtgaggaacctgtactcccgccctcgaatacgcgcgatgatcatccctagttcttctctgctcggctttccacgcccggaatagggcgctcgcaaagtctccacccttttcgttacaattatcgtaacgatctccggtggtgcgggggccgggatttgaacccgggacggccctacggccacgggatcctaagtcccgcccctttgaccaggctcgggcgcccccgcgccggtcgagctcctacctccttctagctcttattaactttatcccccggctgtttccccaagaagtgggagtccatgatcggccacccgtagccgctccagcctgtgttatataattgtgattcgaggaacattaagccaattttatagtgtataattaggattaaagaacagcttctgtcccctaacgacttatgtttacaacgcttgttgatttcatgatctcttaacctactagacacttctttgacggaaatatcatcaccaatatgatgcatcattacactataatgaagatgtaacaatcggataggctaactggaaacccgtaataaaaccgatcgcaaactggcggtgggcaaagataactggggcacgtggacgcgagaaacattacggagcccgggaggaacagcgcgagtctgagacggcaaccgtcgcggatcaccgcaccccacctcacgggtgcaggcgtttgcggtcccgcgggaacagggttacctcacggatgttctcggcgcccgtgatggtcatcagggtgcgctccagtccgagaccccacccgccgtgcggtggcataccgtacttgaaggcctccaggtagtgccggaagtcctcggggctcagcccctgctcttcgatctgccggacgagcacgtcgtaacggtgttcccgctgggccccggaggcgagctccaatccctgatacatcaggtcgaacgccgtcgtcacctcgtcgtccttggccatcgtgtagaagggtctggtctccctaggccattcggtgatgaagaacggctcctcaaagatctcccctagcttgcgctcggcctcggtaggtaggtcctcgccccactcgacctcgataccgtgctcggacagcaggtctagggtctcctcgtacgttatacgctcgaacggtgtctccagctccggtagctcccgatccaatgcctcaagctccttctcacattcctcccgcaccttccggaagacgtgcgccaggagctcctcgagtacccgcatcacgtcctcctcgctctctatgaacgacatctcgatgtccacggagatggcctcgttgaggtgtcgccgcgtgttgtgctcctccgcgcggaagatgggcccgatctcgtaaacgcgctcgaagcccgcggccatgagcatctgcttgtaaagctgtgggctctgcgccaggtacgcatccctctcgaagtacaccaccgggaacagctcggtaccaccttccgtcgccgaggcgattatcttcggcgtgtgaacttcgatgaacccgcgctcctcgaggaactcccggatcgcggtggtcaccacgttcctgatcttgaagatcgcctggggttcctcgcgacggagatccagtacccgtgcgtcgagtctggtatcgaggtccgcgtctaccttaccggtcgggtccaggggcaggtgcgtgtccgactccgagagtacctcgatacgttgcgggatgacctcgacgcctcccggagccttctcgttcgcctggaccgtaccctcgacacggattaccgattccttagtgagcttcggcaccttctcgaacgtttccttcggtaccttctgcttgggaagcgtcagctgtacgatccccgtacgatcgcgcaggaggacgaacttgatccctcctaggtcccttacctcgtgcacccatcccgccagtctcacctcctctccgtcccgctcgggagtgacgtcggccgtgtacgcgtccttgagcaccttccacacccccgtccgcgcacgtggctgcccttaagaaccctcaggacctgcgcgccctcaccgcctccgcgtggttcggtaggccctcacgctcggccagctcctcgacgatcggagccagacgctccacgtccccctcccgtaaccgctggatcgggatgatcttcacgaagtcccacgtacctagggcccccctggcccgtgcgaacccgccggtcggcagcacgtggttggggcccgtggcgtagtccccgaagggtaccgcggtcaggtggcccacgaagacggcgcccgcgttctccacgtcctgtaacagctcttccgggttctccacgcacagctgtaggtgttccggggcgtaccgattggccagtcggacgcactcctccagcgagtcgagcacgactatccatccgttcctgtcgagcgccttcaggacgatctcctcccgctctattcccgcgtccagcagctcctcgacacgctccttcaccgcacgggctatctcctccgagtcggtggccagtaccgccgcggcgtggggatcgtgttccgcttgggcgatgaggtcccgcgccagccagtccgggttggccgagtcgtccgcgatcacgaacacctcggagggacccgccggcatgtccacgtcggttagccctctggagtatgccaggagcttagccgcggtcacgtagacgttcccgggacccacgatcttatcgacccggagcacggtctcggttcccgcggccagcgccgcgatggcctgcgcgccgccgacacgataaacggcatccgcgccggctatctcgaccgccaccagcacctccggcgaggcccgcacgtcgttatccgcgggaggtgtacacacgaccacctcgcgacatcccgcgacgcgtgccggtatcacggtcatgagggccgttgacgggtaggccgcgcgcccaccgggcacgtagcaccctaccctcgggatgggtcggagcgtgagaccgcactccgtcccctccacgtcgaaggtgatcctgtccacgcggggtagggtcttcctgtggaactcctcgatgcggtgggccgcctcctcgagggcctccacggtacgctcgtccacgagctcgcgggcgacctcgaaatcgtcctcggatacccggaggtcctcggcttccagcttcaccccgtcgaaccgttcggtgtactccagtagcgcctcgtcaccgcgttcgactacgtcctcgaagatccgctcgacgtcgggtaggacctccgtcacgtccatctccgacctgcgtaggacgcgttccagctcttcctcttcaggtcgcaccagcagcctcatcggccaacacccgcagccgctctcggatgtggtccagaacccgggccagcacgcgcccgttatcgtactcccggagcacacccttcgcacgatccgggtccatccgctcgtactcccgcgtgatctttcggacgcagcgtacgacgttgtcaacgatggtgatatcggcatcacgggccgtgcgggagagcgggttcaggtcgatggccacgacggtcttcccgagctccttcagggcgcgggtccggtccccgtcctccaggggtaccaggaccacgtccgcccgatagatcccacgatcgtcgaccacggcccgatgcgaggacaggttcgggagcctgacaaggtgctccgggtcggcgcctaacaccctgtcggcaccggcttccctcagggtctcggctatcttctccacgcgatcttccgtccggtggaataggttcacctccagcggagcgcccgtgacctcggagagctctacgaggtcctccgggcatagggcggcggtgttcccgttcaccgatatcactgggtgttcggcgagcttgaacgcggctgccgccgccttgatcgcctcccgtgcgggtggaatcgtcttctcgccgatcaggtagtcgaacacctcgcccctgccctgggcgatcagtccttgaggcaccacgtagccgtcctcgaacccccgcacgaggcgctcacggatcttcaacgcctccgccctggggtgatcgggtggtatcttcacccgcggtcaccccggagcagtttcgagagagcgtctaccaacttcctggccagctcccgcttgtcccctttcacccgctcgatgacctcgccgtctccgtccaatatccaccactccgatccctcggcaccggcggtctccggaggattggcgacgacgagctcacacgggacttcgtccagaagccgtcgggccccttccaccggctcgggatctagcttgaatgccaccctaactccgtcgaaatccggaaacacttcccgtactatcttctcggtagggatcagacggatctcgtgctcacgtcgcgagtccagcttcccgtcggcacgctccgccggtcggaagtccgacggtgccgccgccatcacgatagcgtccacgtcgtcgatcctcttcacgacctcctcgagcatttcgcgggtggtttccacctccacacgctcgtccatcgggggcgggtccactcggagcggcccatggacgaacacgacctcggccccacgcgcacggagctcgcggcagatctcacacgccgtccgtcccgagctccggttggtgatcacccggacatcgtccaagggctccatcgtcggcccgccggtgaccaggaccctaaagcccgacagctctccctccacggcctctactatttcctctatcgaggccagtttggccttcccttcctcgattacaggtcccacgacggtgacgcccatatcctccagctggcgtaggatctcccgagccggtggcgaccggtacatgtgcagggacatcgcgggggcgacgactaatcgttttccggcccctaacgatgtcacggccgtgagggggacgggggcgtcagctaccccgcgcgcgatcttggcgagggtgttcagcgtggccggtactaccgccaccacgtcggcccactcggccagctctacgtgctccgcccgtgatgtgagccggaagatgacctcctcggccgcgaaccccagtgcgtccttacctacgaacctcagggcctcctccgatgcgacgacccggacgcgatgaccccgacgtaccagttcccggcaaacgtccggggcgcgatacgcggctacgctacccgtcacgcatacgaccacgttaaccaaaggttacctccacctccatccccgtgagctccttcacggccttctcgagctcctcggtgtccgcgggcacgcggtgccggtcccggtgatggatcaccgccttgtaacgctcgccgtccggctcgtagactacgttcacgctgagcaaccgagccggtaggatcagatcctgtatgagtttcctcaattggcgtacgtccttgggatcctctacttcttccacgacgcgcaccttcttacctaagtggtccgacagggccctcgagatcctaccccgcttgccgatgagcttcccagccatcccctgtttcgtcaccagcaccaccaggtttcccgtgtctatggtcctcagcagcgcgacgtcttcgagcgacgggtggtcttccttcagttctactagctttttggacacttcaacgtcggtctccgtgatctctccctgttccagtctttcctcacagcccgggcatagaagcccggtcttcgcgcacacttcacagatcggtaactccaacttcaaacccccgagaatcaggttcgggaggccgccgtgggaatcgtccgttaaaaagttgacccgtagggcacccggtccgtgtggcgcgttcccgaaactcatttaccagatccacggcactgcgcacggtccagccctataatcagcgagctagcgggggtacacaccatggcagaggaggagaacgtggtatacgtcggcagtaagcccgtcatgaactacgttctggcctgtattacgcagtttaatgagggcgccaacgaggtccggatcaaggcgcgtggccgtgcgatcagccgtgcagtcgacgtcgcggagatcgtcaggaaccgcttcatgcccgaggtcgaggtcaaggacattaagatcggtaccgaggagctagagacggaggagggcgacaccgtcaacgtgtctacgatcgagatcgtgctcgagaagcccgtgtaatcgggctttttaaccctgtcattctcctctcagtccttctaattctcacgcgaaccgggaccggtaccgggagcgctacgcccggatgactctcagattccctcgatggtgtcgccactccgagtccgggaggaatgtactcggtgggccccgatgacggtgcctgagacggtgttcggactctcctcaccgtggtcgtagtcacggcttcttctcccatcaaccaacctagagcatcggcgaagaatacctcgacggtgtagaagccggagcccccggttttcacccacacgtctatcaccggggatatatcccccgatttgacttccactccctccaagtcgccctctacgacagggtggtcgggttccgataacttcaccagtgctgctccgactacctggttacgccggctcactactatcactacggagagtccctctctgatagttggaaggttagagagttgtactcggtagtggacttcctcgctgctcgtgatagttggtccagagatgttcacagcgatcttcagcatcctgtacctcagggggatgaccggtaggtatccgccgattaatgtcaaggaccgtaagcacgcgataggaaccgacggcagcgcgaacacacgttgttcggtcccttgttcagtctggtatatcattaccaccatcttgccgatgacgtacccctcgcccgtgggtaccccgggcggtgtcatggttttgcctgtcggtatcactacgactgatttcactccctctgcggttatggttaatgtcgatgcccacggctcccatagtctgatatcgttgaactcgtctgtgggtaacaccacgttgggcacgaacttcggatctctagccctagtgtcggatgtcccgagcacccacaggagttcctcgccggatttcccttcggattctttttcctcggtcgtccggactgccaccgcgagcacgcacggtgtcgcgtatacagtatctccttcccgttctaccgctacgggaattgggaacgatcggatgccgtcactctcgacgacgtccaaccagaacatggccgaatcttccagccccttgatccctatcagggacaccggcttagagcccttcggaacgatggctgccggcttgttcctgatgctcgccaagatcctcgggttggcgcatatctctaggacggcgggttggcaccagatcacatcgccatcgaagattacctcatccgtcggcgaggggttcaggaggtccttcagataagagatcgggtcccttccgtccgtccaagcggtcaggaacaccaccgtgccgtcactcaaggtagtgtgggccagtagcagatctccgatcggaagtgagcaagcttcgtcggacaacctcgtgtgtgcgatgggtaggtatgtgtcgtcgaccggcgagtacccgaggagggtgagataaacgccgcattccttccattgcttggcgtacgcgacggctacccaattcgccaggatcctccggtccttgagtcgatactcacagtatccaggcactttcacgacgtcggcgtcgaacgtggtcacgtactggaaatcgctgatgacggaccctgggacgacttcgaggctgaggttactcggatccactcggacgagtgcggagtacaggtccgcaccgtactcctcgactggtttcccttgcacgctcacggtgtacaacaccaggaacaggggcctctccacgttgccggaatattcgtagcccacgtgcaagacacggattcggccgacttttcctggggctcggattgcatacttattatcggcttccagctcgggcacgtacagggcttcacttccgggtaggttcaagtaagtcacgaacgacagacggaacgcgtgcaggaggacgccgtcgctgctcgggcttacgaagaggacgatgccgccgtcattagagggggcgtaagcggcgtcggtgggagtttccccctgtacggatttcagcttacgagcccaaccgttccagttcacgaaccatatgtccgcgcctgacttggtactcgtcgcgaccaggacgccttccgcttccaccccaggttgtacctccacgtgttgtctcgtcgtgacctcacacgcgcaacacaccttggcgccggtcagcttcacgtctccaggggtcgaggtatcgaagtgtgggaagtagtcggagaacatcgttcgtagttcttctctccactgctcgtacggatcgctcggaggttccaacgaggccacgggcgccgtcacggcaaaaaacattataagtacagcggggacgaggtggtgcacggttcgggttcccccgaaactggtttcgggaaagccgtaaggtcgggtggttagggaatgtccccgttcgagctcgagttcgaggggttgaaagtccagataggctccatcgagggcttcgagcccaggggagaggggccgctaccctgcccgaccgtctcagatctcgcggactgggatagaaagcttttcgcccggtatcgggtgatcgcgtttcccatctgtgacatgtgttgtatgtgcacctacggccgttgtaatctggccgagggcaggcgaggagcttgtggaatagatatccgctccaacacggcccggttcaccgcgctcaagacctgcatcggtgcggcctgccacgcggcccacgcacgccacctcgtcgagtacatcttggaaaagctcggtgacgttgagatcgatctgggctccgaggtcgacgtgatgactccgatattcgagacgctcgtgggattcaagccgaagacggtttcggacctcgagaaggggcttgagtacatcgagcgcgagctcacgaaggtcctatcgtccgtgcatgtgggtcaggagatggatccccacgattacgagtccaaggccctccacgcaggcatgatcgacaacctcgcgctcgagatcgccgacgtggcgcagatcgcggccttcgatatgccgaagggtgaggcacccctcgtggagttcggaccgttcgcggcggacgactccaagccgtgtatactgctcgtaggtcacaacgtggctcccggcaccgaagttctcgattacctggaagagcgcggtctcgacgaggaggtcgaggttctcgggatctgctgcacggcctgggacgtcagccgtgtggacgaccgttcgaaggtgatcgggcccctatcgaggcagctccactacgtgaggatgggtatcgcggacgtggtagtgctcgacgagcagtgcatccgcgcggacatcgtggaggaagccaacgaggtgggatctagagtcatcgccacgcgcgatctagtgatggccggactgccggacgtcacggacgagcccacggagaagatcatcgagaagatggtatccggggagtggatgggggtcttcatcgaggacctggagaaggccgccgaagtcgcggtcgaggtcgcgataagggttcacgagcggcggaagaaagagatcccacaacctgacccgaagaaactccagaaggaggccaagcgctgtttgggatgtggcgactgtgaacgggtatgccccaacgacttaccgatcgtcgaggctatggagagggcggcgaacggcgacttcgagggactggccgacttgttcgaccggtgcgtgggttgtgcccggtgcgagtccgagtgtccgacgaagctccgtgttatgaacatgatcgaggacgcctggagactgaggactaaagaggaaaagtacaaagtgcgtaccggccgcggtccgattaaggatgtcgagatacggcaggtaggaggtcctatcgtgatgggggatattccgggtgtagttgccttcgtagcgtgtccgaactatcctgatgatgtgaagcaagtgggtaaaatggtggaagaacttctggaacgaaattacatcgtactgacttcgggttgcactgcgatggcactcggtatgtacacggatgaggatggtaagaccttgtatgaaaagtacgaagataggttcgatgcaggttgtctcgtgaacactggctcctgtgtctcgaacgctcacatactcggcgcatgtattaaaattgccgccatcttcgcgaagaagccacttaaagggaacttcaaggagattgctgattacatcctcaacaggatcggagcttgtggtgtactgtggggtacgatgagtcagaaggccctcgcgatatccacgggcttcacgcggtggggtattccgatagtttacggtccggctggtctcaaatatcaaaccttatacatcggcgacctcgacggggattggacggtgtacgacgcacgcacgggtaaggagtgcaaagagtactgtcccattcacctgaagtacgcagcggaggactggagggaggcgctcgttcaggcggtgaagctctgcatccgccccaacgatacaccgcagggacgacagacgaagcttcagaactacatcgagctgtacaaggagttctacaacgagctcccaccggacctgccactgtacgtccgtgacaagaacgacgttccgatcaccctgcgcgacgaggtgatggagtacctggaggaggtcggttggaagccccggaagggtatcaccgagccgaccttactggaggagaacgtgcggggttaagcccgttgccgctaccgagggaccccacactgatttacacggacaaggccgaggtggcccgagcgccggtgctcaagatggtgttccgtcgcgctaacgattcgctgatgatcgtcggcccgagggccgtggaggacgaggagtggcgagaactcctgatgaagctgcgcgaggagttcaggatgagcgccgtctgcacggccccgtacaagggcaatgacctgggtcgcaagatgggcatcgtcgaggcggcgaccctgctccagcgggacgccccggtgctcggagttcacccggatcttgtcgtgttcacgggctcccgcaccgacgtaaccgaccgcgtgcttcaaggacttcgtcatgcgcggccggacctggtgaaagtatcattgaaccccgagtactgtcccagcgcagattactcgctacctacagtgaagagggatcagttcctccaagagttgaaggctttagtgggaatctaggggtgagaagttgggcatagaatgggagggagtcaaagtcgagataggagagctcgtggtggaaggagactccgaaagtgagatggaggggccgacccgccgcgagttgctcccgtgggatcggacgttggcgtcggtctacgacctggccgtggttcccggtgattcggaagaggagcgacgagaggtagctcgtacgatagtaacgctctgttgcgaggggacggcagggctcatctccacggcccgactcgtggtggaactgctgcgtcaaacgggggagaacctggaccctggattcgacgcggagacgccgctccccctctacgagacgctactggggagttcccccgagtgtgcagatgacctcgaggccggattatcctacgcggagcgggaactaacgtcctcggtttcggagctcctgcggtcgcattccctaaagggttacgagtccgtggccatgcacgccggtgcgatcggtctcctcgcgatggagatagccgatgcgaccccctccacgctgatggaggtcacggagtcggaggaagtgtttgagatcgggacggatgatctgccgagacgtcccacggtgttactggtcggtcatctaccgctcttggggcacatcatcaccgaagagctaggaacgctcgcgagacaggtggagctcgtcggactaacacacaccgcgtggcctaaccgagaggaccacgtcagggtcgtaggtcccctgtctatgtaccatgaatacctctcttccgggttcgcggatgtggtagtggtcgacggggcgtgtccgggagaagacgtgatcgaagcggcacgtgagggcggatccaagctcgtcgccaccgtcggggcccgcgtggcggacctactcgacgtcaccgactacccggttgaggaggcggtcgaagtcctcgtcaccgaggaggacgccgtttacgtggaggaacccatcaaggccgtggaaatcgccgcgtgggcggcgcttcgagtcgagggatcgcgcgaccgaagagaacctcctcggagggctttccgggtcggcccgccgactcgcctcacggacgtagtgatccgaaacgtaggtgttccggtagtagccggcaacattccgggaatcgtcgtcttggtatcctgccccgagaaatccgcggacgtcgaagagcccgccaagatcgccgaagtcctcctggagcgcgggtacctcgtgctggttccgggttgtctagccgtcgcgctaggttcgtacctggacgacgatggtaaaactctgtacgaacggtaccccgacacgcttctcaacaccggtccctgtacctccgccgcgcacttagtcggggcttgcatccgtgtgggggtcatcttcggtaagctccctatcagaggggagttcgtgcgggtcgccgattacgtactcaaccgggtcggggcttgcgtaatagcctggggtggcgagtactcggaacacctggtttcggccgcctacggggtcactcgatggggtattccggtggtactgggtcccgacccggaggctggttcgttgttggtcgagaagaacccgaaggttatcgacgcttgctcgggagaggaggtggaggatcccaccccggagcacctgaggtgcgtggtttcggattggaaggaggcggcgatcacagccgcgcggctttgtatgcgtcccaacgataccccggaaggccgccagaacaaggtcgagtcgtacgtcgagctgtaccgggagttgtacggagaattaccccccgatcttgacctgctcatccgggatgagagcgatatcccggtgacgctcaggtccgagatacgggagctgctggaggagaccgggtggacacctagatcgcgcgcatccgatcctaccctactacccgaggggtgaatgtaacattgacgagtcttgcggatctacccgtggacgtgagcccgaggcacgagggcgagcggatacgaagcggcgacatgtacgtcgagctagcgggcccaaagagcttcggtgccgaactgttcaaggtggtggatccggacgagatcgagccggacaaagtggaagtcatcggcccggatatcgatgagatggaggagggagggagatacccgttcgccatctacgtgaaggcggcgggcgaggaactcgaggaggacgtggaaggtgtgctagagcgacgtatccacgagttctgcaactacgtcgagggtttcatgcacctgaaccagcgagatcagatctggtgtagggtctccaagaacgtcacggagaagggcttccggctggaacacctcggcatcgcgctccgagagctgtacaaggaggagttcggcaacgtcatcgactccgtggaagtcacgataatgacggacgaggagaaagtggaggagtttttggagtacgccaggagagtctacaaaaagcgtgatgagcgtgcgaagggactctcggaggaggacgtcaacgagttctacgtgtgcctgatgtgccagtccttcgcgcccactcacgtgtgcgtaatcacaccggaccggccgagcctctgtggatcgatcacctggcacgacgccaaggcggcctacaagatcgatccagaaggccccatattcccgatcgagaagggagagtgcctcgatcccgaggccggcgagtacgagggtgtgaacgaggcggtcaaagaacactcacagggcactgtggagcgggtttacctgcactcctgtctcgagtacccgcatacgagctgcggctgcttccaggccgtcgtgttctacatccccgaggtagacggattcggaatcgtcgaccgcgagtacccgggtgagaccccgatcgggctcccgttctcgaccatggcgggtgaagccagtggcggtgagcagcagccgggcttcgtcggcgtaagctacggttacatggagtccgataagttcctacagtacgacggcggctgggagcgcgtggtttggatgcctaaggcgctgaaagaacgcatgaagcacgccatccccgacgagctgtacgacaagatagccaccgaggaggatgcgaccaccgtggaagagctccgggagttcctcgagaaagtcgagcacccggtcgtcgagcgctgggccgaagaggaggaagaagaggaggagaaggctccggaagaggaagcgccggccgaagagccgacgatggaggtgaaggagctcccgatcgcgcccggtggtggtctgaacgtgaaaatcgtgctgaaaaacgcgaagatctacgctgagaaggtcatcatcaagcgcgccgaccgggaagataagagttgatcatagccttcactgggaagggaggcacggggaagactctcctcgccgcactcacagtactcgagctcctcgaccgacaccccgacgccgacctgctggtggtcgacgccgacccggatgctaacatgcccgacgtgctaggggtagaggtcgacaccacgctcggtgaggtcagggagcacttcaagcgcgagatcgagggaggagagctcccacccggcttcgataaacaggcctacatggaatacttggtgatgaccgcgcttcaggagtccgacgactacgatttgctagtgatgggtagatctgagggtaagggctgctactgcgccgtgaatcactggctccgtcgggttatgcgggagctcctccccaactacgattacgtggtgatggactgcgaggcagggctcgaacacatcagtcgtggtatcatcgagggtgtcgacacggtattgaccgtcgtggatcactcctacaaggcgctccggaccgcggtcaggatatcccggctgatcgacgaactcgaatccgacgtcggtgagatgtgggtcgtggcgaaccgcgtgaccgagggggaatacgcggtcatacgcgagaagggtgaggagcttggtcttaggttcgcgggattcgtgagacccgacgacgaggtagttcgactcgagcttcatggtcgccctctgaccgaactcccaccggacgccaaggtccgccgtgatatgcgcgccgtgcttacgcgggtgggggtgctcctatccgatggctgaggataagggcgtgaagaacatgcttgagcacctcgtgaagaacctattagtggaagatgttgaggagatcgagctgcggaacgtgacgatcgagttagacgagctggagctggacctcaaaaccgtggcccaaactctgccggttgagatctgggaacgcatactcaagcctgaggttgaagagaaggagagagaggtcgaggtcccggaatacgaaccaccggttgaggagtacgaaggctgtgtggccgaggtgcagatcggggcgacgcggtccgacggcggttctcgggatcgggtcgtcgtcctgggtggtgagcgcgcctacttcccgttcgaagaaccacgaccgaaccctcccgtggtcacgttcgacgtgttcgacaccccggatgtgggtatccccggacctattcgggaggagctgggcgacgtcatcgaagaccccgtggactgggcaagaactgtcgtcaagcgctacggcgtcgatatcgtcaccgtccatctggtcagtacgtcccccaagctccatgatgctcctgtcgaggaggctatggagacactggaggacatcctcgatgccgtgaaggtcccgatcatcgtgggcggatccggcgaccccgagaaggatgtggaggtgttcgtgaaggcggccgaagtctgcgagggagagcgggtgatgctatcctcgatcaacgaggacatggacttcgagcgggtggttgaggcggccaaagaacacggtcacgtggtactgaccttcgccccggtcgatgtgaacctcatgaagtccctgaataagaaagtactgaatagaggcctctcgaaggaagacgtcgtcatggacccgacgacctgcgctctgggttacggtatcgagtacacgatcgacgttatgaccaggatcaggctcgccgcgctgaagggtgatgaacacctgcagatgccgatctccagcggttccaccaacgcgtgggccgcgcgggaggcttggatgaaggaggaatcttggggaccgcgtgagtaccgcggaccgctgtgggaggcggtaacggcgaccacggtggcactctgcggtgccgacctgttgatgatgttccacccgtgggccgtgcaagtggttatggaggctatggagtacatggccgaaggacgcgtcaccggagacgcgtacgtgaccgacgtgatcgcctgagggggagacgctcgtggcccagctcagcgcgatggacgtgtacaacctgctacccaaggccaactgcggggcgtgtggctgcaagacctgcatggaattcgctacgaagctcgtcaatcgggaggcgaagcccgaggattgcccgaagctcgacgatgagagcctagagaagcttcaggagctgctagcgccgccagtcaaggagctgacgataggggaaggggaccgcgaagtcaccgtcggcggcgatgaggtgatgttccgacacgagctctcgttcttcaacccaccgccggtgttcgtcaccgtttacgacgacatggaggaggacgaaatcgccggaaagacggaggaaattcaggagtttcaagtcgaacgcgttggagaggtcctgaagcttgacggcgtcgcggtggtatcccgaacgggggaccccgagaagtacgctcgggcggttgagatcgcggtggagcgctctgaggacctcgccgtggcgttgatcaccactgatcctaaggtgatggaagctggtctcgacgttttcgacgaacgtccgctgctttatccggcgaccgaggagaacgtcgaggacctagcgaagctagcggccgatggggactgtcccctgggacttcacgcccgtgacgtcgaagacctcgtacccctggtcgtcgaggcgcagcagtacacggacgatctgctcctggacccgggtacggagttcggtccccacgacgtggtttctaccacggacaagctggcggagatccgcaaggcggctatcgaggagttcgagagcttcggttacccgaccctcgttacgacgtttccctacgcgttcctcgaagatgatcccgtaaaagccgctagacgggaatcgtacctagcgtccgcctgtgtgctaaggtacgccgacatccttatcatggacaccgtagaaccttgggcgctccttccggtgctaacccagcgtcagtgcgtgtacaccgacccacgggagcctcaggaagtagaacccggcctgtacaggatcggtgacccggacgagaattctcctgtgttagtcacgacgaacttcacgctgacgtaccactgtgtggccggcgacctcgagagcgccgacatcgactgttggctgctggtcatcgataccggcggactagccgtagacgtcagcgttgccggcggtcagttcacgggggaggccgtgaaggaagtcatcgaggagacggacatcgaggacaaggtcgaacatcgtgtccttgtgatcccgggcaaggccgccgccgtgaaaggggacgtggaggacgccaccggctgggacgtgatgatcggtactcaggactcgtccgagctgcctgagtttctggagaaagaaggtctactgaggattgaggaatgaccggcgactttatccttccccaaccctggcgctagggacctcggggatgagctgttgatcctggtgaccggaggagccgggttcataggttcgcacgtcgtggaggagctcgtcgatcgaggccacgacgtggtggttttggacaacttcagcgtgggttgtgaggagaacctccgtgaggtccgggacgatatcgagatcgtacgtgccgacgtgacggatcctagggccgtggagcgaacgtttcgggagtaccgaccggaggccgtgattcacctggccgcccaggtcaacgtacgctactccatggagtcgcccttcgtcgacgccaggatcaacgcattgggtaccctgaacctcgtctcgttggccgccgagcacgacgtcgagagattcgtatacgcgtcctcgggtggggcggtgtacggggaaccggagtacttacccgtggatgaggaacatcccacgcgaccgatatcgaactacggcgtctcgaagctcgcaggtgagtactacgtccgtgtgtacgccgagcgggacgggttcgagtacgtcatcctacgatacgctaacgtttacggtcctcggcaggatcccaggggcgaggcaggggttatccctatcttcctattacgggccgcccgaggtgagccgctcacgatcttcggggacggtgagcaaacccgtgacttcgttttcgtcgaggacgtagctcgggtcacggccgaggcggtggagcgtggtgatggtgtgtacaacataggtaccggccgtgagacctccgtgaacgacatcgtgaacgccgtgaaggcggtcacaggggtcgacgtggaagtagtgtacgaggatccgcggccgggcgaggttcgtcggatatacctcgacccgagccgcgcccgggaggagctggggttcgagccacgcgtcgacctagaggaggggatcgagcgaacctgggagtggatccgtcggaaaatcgcgtagccctttaatccccacctcggaggtcctgggggtgccgagttgccggacgttttcgtcctggtcgtcgccccggacaggtgcacggactgccgtaagtgcgtcaacgcgtgcgagcgcacccacggtcacgcccggatttacaagatctccgaggatgcgccccccgtcacgtgtcttcagtgtgacgacgcaccctgcgcgaacgtctgcccggtgaacgcgatcgtggaggagggcgactcgtggatcgtcaccgaggactgcgtcggctgcggtttgtgcgccgtcgcgtgccccttcggcgccatcgaaatggtgaacggccgggccgacaagtgcaccctctgcgtggacgcccccaagaaagtgcccgcgtgcgtggaggcgtgtgatcggggcgcgctgaagttggtctcgaagtcgcaggtcgcggaggagaaacgcgaacggttcgccatcgagatggaacggatataccggacgctcgcgaagctcgaatcggaggaggggtcccttcggggtgaaagtgggagtcgtgggtaaagggggcgtcggcaagaccaccgtagccgccgctctcgccaaggctctcacggacgtagggtacgaggtgctggccgtagacgccgatcccgaccccgacctggcttactccttgggcctccctgaatcacccactccgatcgtcgaacggcgcgagctcgtccgggaacgtacgggtgcggaaccgggcacgacctacggccctgtgttcaaggtcaatccgcgggtctctgatctccccgacgagctcgccgtgagggtcgcgcccggtctccgactcctggtggtcggaagcgttgagaaccccggtgagggttgcttctgcccggccgccgcgttggcacgcaggttaatccgttacgtcatcgccgacagggacgagtccgtagtggtggacaccgacgcgggtctggagcacttcggaaggagggtactggagtccgtcgactgggtagtggtggtgtgcgaaccctctgttaagtccatgaaaaatgcccgagagtcggtgcgcctcgcccgtgagatggggatcgagagggtagccctcgtcaagaacaagtggcgggaggacgctccggagcccgatctcgacgtcgacttcgagctgacggtcccgtactccgacaagctcgtggagctggagatggaggggagaccggtatgggaggatccggtggtgaggaaggcgggagaggagctggcaagacgtcttacgaggtagtaatccgcgaggagcactgcaagggatgcttcctctgctcctgggtctgcccgatcgacgcgctgaagaggtcgaaccggaggaacgagcgcggttacctgctcccggaatggaacggcgagtgcaccggatgtcgacagtgcgagctcatttgccccgacctcgcgatcgaggtgagggaggtggagggagatgggtaaggtcgacttcctgcaaggtaacgaggcctgcgcggaaggagcgatcgccgcgggttgccggttcttcgccggctacccgatcacaccatccaccgagatcgcggagcggatgagcgcacgacttcccgaggtcggcggcgtgtacgtgcagatggaggacgagatcgcctcgctcgcagcggtgatcggtgcttcttgggccggcgtcaaggccatgaccgcgaccgcgggaccgggtttctcgttgatgcaggagcacatgggctacgcggtgatggcggagacgccctgcgtgatcgtgaacgtgcagcgcggtggacccagtacagggcaacctactaaggcatcgcagtcggacgtcatgcaggcacgctggggctcccacggagattacgagatcgtcgcgctatccccctccacggtgcaggagatgtacgacctcacgatcgagtgcttcaactggtcggagcgtctccgcgtgcccgcagtcctcctcacggatgaagtcgtcggacacatgcgggagcgtgtggtactgcgggacgacgtcgaaacggtcgagcgggagctaccgcccgagggtgaggagatcgagaagccatttccgatggagcccgacgatctcgttcccccgatgccggtgttcggcagagggcaccgagtccacgtgaccgggctcacccacgacgagcgaggatatccggctacggacgaccccgaggttcatcgcaagctcgtcatgaggctgtgcaacaaggtcaggaagcgggctcgagagatccacgaggaggtagggtacgacttcgaggagcgcgagtccgacgtcgccctagtggcctacggaggctgcgccaggaccgtgatcgaggcggccgaggagctcggggtcaccgtcttccgccccaaggttgtccacccgttcgaccccgatatgatccgtgacttactcgacggctacgaggtcctagtcgtcgagatgaacttgggtcagtacgtcgagatggtcgagcgtgccctggatcgcgagtgcgtgcacctgctcggctatccgggtggctatccaccgaccccagagcgcgtaatccgtgaggtgaagaagctctcggggtgaccgtcgtggattggaaggagctcgtacgctgggaccgcatgccgcacatcctctgccccggttgtgggaacggcaccatcctgaacgcgctggttcgcgtcctggcggagaagttcgaggaaggggagctcgatccggataagacggtgctggtctccggcatcggttgctcgtccagattaccgggctacgtgaaactggactcccttcacactacccacggtcgtccactggccttcgcgactggaatcaagctggcgaaccccgacctcgaggtcatcgtgatcaccggtgacggtgacgcggccgccatcggtgggaaccacctgatccacgccgcccgcaggaacttggacgtcacggtgatctgtgccaacaactacatttacggaatgacgggcggccaggtcagccccacgacgcccagaggtgccaagtcgaccacgactccctacgggaacccggagccaccgttcgacctttgtgagctcgttatgggggccggagcccctcacgtggagcggtggaccacggctcatcccgcccagttgaaggccgcgatcgcccgtgccctcgagcgcgaaggtttctccttcatcgacgtgctctgtcagtgtcccacgaactacggccggaggaacgacatgagggaccctcgagagatggtcgagtggctccgggagaacacctccacgcgggaggaggaaggcaagatccggatcggaatcctccgcgatgaggagcgcgagcctttccacaagcgcatgtacgacatgatcgaggaggtgagaacgggtgaggaaggagattaggatcagcgggttcggcggtcaagggatagtactcgccggcgtggttctgggccgggccgccgcggtttacgaggggtacaacgccgtgcagacgcaatcctacgggccggaggcccggggcggtgcctcgcgctcggacgtgatagtatccgacgaggaggtcatgtacccgtacgtacgccgacccgacttcctcgtgactatgtcgcaagaagcctacgagaagtacgtggggagcgttcccgaggacggtctcgtcgtctacgactcgacgctcgtcgaaccctcccgcgaggacgtcgagcacgtgggcgtccccgcgaccgagctcgccgaggaagagctcgggctcaggatcgtcgctaacatggtcatcttaggcgcgttgcgtgagctcaccgggatcgtctcgttcgactcactacgaaaggccgtcgaggattccgtaccgcccgggacggaggacgtcaacgtccgggccctcaagctcggagcccgggaggtgagggaatgatcaggctgttggagtaccaggctaagcatctgctcaaggaggccggggtgccgattccagaaggcgacgtcgcccgcacctcggcggacgcggcccggatcgccgccgaactcgggggaccggtggccgtcaaggcgcaggtgcccgtcggggcccgtggtaaagccgggggtatcctgttcgcggacgacccggaaggggccagaaaggccgcccggaagctgctcggctcgcggatccggggtgagaccgtcaggaaggtgctcgtggaagagaaactggacatagccgaggaatggtacgtgtccataacgctcgaccgtgcgaagcgtaggcccgtactcctcgtctcccgcgaaggtggagtagatatcgaagaggttccggacgagaagatcgcccgcaggtacctcgacccgatcctaggattacgccccttcgaagctcgagaggcgatcctcgaggcgggtatcccgaaggagcacctgcgggacgtcgaggaagtgatcacatccatgtacgaggtgttcgagagctacgacgctcacctcgtggagatcaacccgctagttcttacggagaacggggaggtagtggccgcggacgctgtcgtgaacctggacgaagacgccgccaatatccggcacccggagttcgccgaagagacccgcgatttccccttcgtcgagctcgacggtgacatcggtatcatcgccaacggtgcgggtctcaccatggccaccatagatctcgttaaggatctcggtggtaagcccgccaacttcttggacgtaggtggtggggcttacccgacgctcatccgtagagccatcctcaccgtggccgagctggacgtgaaagtgatcctcctcaacatcttcggtggcatcactcggtgtgacgaggtggcggaaggtatcgttcaagccctcgacgacgtggacgtcccgctcgtggtgaggctcgtggggacgaacgaggaggaaggtcatcgcatactccgcgagcacggggtcgacgtctacaccgagcttaaggaggcggtcgaacgcgcggtcgagttagcgggggcttagcccttgttagactcagacacgcgcgtcctcgtgcagggtatcacgggccggcacggaagtttccatacgaagctaatgctggagtacgggaccgaaatcgtcgccggcgtaacccccggccggggcggccaggaggttcacggggtcccggtctacgacaccgtcgaagaagccgtcgaagagaccgacgccgaggcttccgtcatattcgttccagctccgcaggcacccgacgcggtcatggaagccatcgaggcggggctcgatcccatcgtcgtgatcaccgagcacataccggctcacgacaccatgcggttcgtcgagctagcccggtgggaaggtatccgcattatcggccctaacactcccggaatcatcgtaccgccggagcgggtgaagctggggatcatgcctcatcaagtgttcaccgagggtgaagtggccgtagcgtcgaggagcggtaccctcacgtacgagatcgttcaggcgatgaccgaggccggactcggtcagtccctctgcgtgggactcgggggcgaccaaatcgtcggaactaccttcatagacttcttggagtacgtccgggaagatgatcgcaccgaggccgtggttctcatcggggagataggtggaaatgcggaagagctcgccgccgagtacatcgcggaaaccgacttcccgaagcccgtcgtcgcctacatcgccggccgtcacgccccacccggcaaacgtatgggccacgccggggccatcatcgagagaggtcgtggaaccgcggagtccaagatcgaagctttccgaaaggcaggagtcgatgtagccgagaagccgtgggaagtgccggagctgcttcgggagtacctctagttgaaactctccgtccccggtgccctgacgggcttttttcacccgcagcccggtaagacgccgaaagacacaggatcgcccggcttcggcctagccgtcgattccgttgtgatcgtacgtgtccgacgccttcgggctgagcgtctcagagttcgcgcagatcatccaatcgactctcgaatagcccggaagtgctacgaagtgctcgatcccgatgggggcctcagcgttcgttacgaattctccgtaccccctggttgcggcttagggaccagtgcggcctccgccctgggaacgttggcggccggggccgccgagataggtctcgaggtgagccccgagtggatcgcacgtcgcgcttacgagatagagctagagctaggtacgggcatcggtgacgtggtaacgatctggcacggcggagccgtcctccgggtcggacccgggtacccggacgaggttctcatccaccgaataccagtcgaaccggacctccgtgtcctgatctatgagccccgacctatcgagactcgcgaggcactcgatggactttcgggcaccgaggtagccctcaggtacctgaaggaactcgagaggcacccggatctcgaactcgcgctccgtaggtcgttggaattcgccgaacggctcggattctccgaggaagttaagctcgccaaggagctctcccacaagcacctgggagcttcgatcgccatgctcagtcgaacggttttcgcggtatcgtgggaacaggatccacaagccgacgtcgagctccctgtatcctgcagctccttcccggaaatcatttcaggaatttccgaaattcagtgtgaacggggactgagagatgtgtgagttcactgtcaaactaggtggtgaggtgatcgcggaggacgtcctgtacctggaagtgacggaggagggtgtcgtactgcgcgacgtgatgggggaggaacaggtgatcgaaggtgcccaagtcaagcgcatcgacatggacgagcacgtggtggagctcgagcgctgacccccagttcaggtcccgaccccgggcaccgaggatcgttatggacaccataacggtcatgagtggggctcggcgctcatgggactcgtcaccgttcggccggcctggaagtcctcatcgcccgagtcaaatccttcgccgcttccacggggtcgtgcgcttccgtgatcgcccgaccgactatctcgaaatccgcaccagctcgcaccgcgtcaccgggcgccgctccctgagctcctacaccggggctggcgatgagcttgtcggtgatcttccggacctcccggactctctcgggtctcgtcgccggggccacgtacccgacaacaccgtcgatgtcgtcgcatgctttaacgatgtcccggcaagctcgatcgtagaactcccgcgcccccgggtgactcatcgtagctaccacgaacaccggtagcacctcagcgcattcctcgacgacgtccggacctacgaacccgtgaactatggcggcgttggcgccggcctcgctcacacgctcgacgatcgaccgcgatatctccggaatgtccgccgttttcaaatccacgagcaggaacgattcttctagcacttcggcgacccgctctatccccgccgccccttcggccagcaccacttcgtaccctactttgaacccgtcgacgtatccgtcaagtgtttccgcgatctccaccgcgcgatccggtgacacgtccagcgcaacgatcaggcgcgtatcgggttcgagcacctgatcgcccccgtcaacagttccgcagcgtggtacccgaggtcgaaggttatgacggcgagtgccgtgataccgtccaggaccccaaatgcccagcccaccacggctccgatcttgagtacgggtcgtaatcccgtgggttcgacggggtgaatgatctcgtcgagggtcgctaagaccgtgatgaccagcaaggtgagcggggttacctcggggcgcgtgatcaggacgccgagcgctacgatagcggcggccgcgaggtggggaatctcgtcgatcttaccggcgacggcgttgccgaggatcagtcccaggtataagtccggccttaccccggtggccacggaagctagggccgcggccgccgccacgagcccgcacggtaacgcccactgcggccggctcaactcatctaccaagtcgtccgcgatcttcagcgcgaacccggacaccgccgccagctcaggccccaatcatacgatccccagccgctgcatgacgccggatgcgagcagtgggaagattatcaggtagtcccccacgatggtggccacctcggcgtcttctcgcaccttctcccacgatttaccttcctccagaggcgcaccactgaggcttcccgtttcgggcctatccatcgtgatctgaacggcgtagtccagaccacctcgaagcatcgcggcccccatcgcgaagtgcttcggcacgctcccgcctaagatgatggctcctaactcctcggcttcgaaaacgaggtccgcgagatggtgcatatcgtccacaaggtccaggtgaaagtcgtgatcctgtgagtgtatccacacgtgcaggccgaccatcgagtccagtattcccggcgagtatatcggcactccttcgtcggctgcggccctgaggaagccgctctcgagcctcttccccatttcccacagcagctctcggcaggatacgcgccccgagagatcggagaggacttcccgcatgaagtgctcgaacttctcgaacgcttccgtcggtatgtgcgtatcatgaacccgaccgtacccatcgacgttgcgctctcccaagcacacgtggataccgccgagggcgtccagggcgtcgtgaactacgttagcgccggacgtgatcacggcgtcgacgaggccttcacggatgagccgctcgaagagctcgccgagtccacccgctaccgcagggccggctacggtgaggaggaccgtgacgtcgtccgaagaccacatcttctccaagatccgtgccgctctacccaatcttccggcgcctaacgcgccgacgcgttccatctctcgcaggaacccgtcgaggtccatgtcgcctcgatacctgaacgtttcacgcttcacctttcagccactcccttgaggtattcgcccaccaagcgggcggccgtcaccggcgacacgtggctttcgaccgtgggacagagctcgactacatctaggtgagcacgcttccgaccggcccatctcaagatgtcggcgcagaggcggtacgggagtccccccggttctggagtggttacacccgggactacggacggatccaggacgtcgaggtctagcgacacgtagtccacgtcgtcgattacctcggttatatctccgtgatcgacggagaccacgtgctcgtgctcgcggaacacgtcgtactcttcccgggaccaacacctgacgcctaccaagaacacctcgtcgacgatctccaggcagccccgtagggccccgtcgtgacgttcggatctacggaggtccgggtgcgcgtccagccagagcaaacgccgtggggtgagttcttgaacgatttcgggcgtgatagagtgatcgccgccgagcaccacgaatatctcgggctcgctttcaggctcgaacgtcctgaggttcccctcatctaccagggtcaggatttccagcgggtcaccgacctccgggtcgtaaaagtccagggtggaagccgccgacctcacggcgttcggagcctcggcttgtccggtcgggtactctgggagcacacgctccctgggaagtccgactacggctacatccggggatttcacgtcgtcggatgaaaacgagagtgggaagcggggttcactcttcctccttgattcccacaattttacgcttgcccgctgcctccatgtactccaccatggttcccggttcaagctgcgaggcgagttcctcgtcctccggcttctgaacttcgaatgtctcgtaggtttccatatccatcagctgcaccgtatcacccatatcggagactacctgggctgtcttccgctcgatcaccggtacatccaccttcgcgtccaccggtttagtaagcgtgcgcttcttaccgtcgaacagccctaccgctacgatccgcgccttcgccgaaccgtgcttacccggtgaggacgtggtgtactccacaatcttacacggctcgtcgtcgatcatgatgtacttgcccttcttaagctgccgcacctcgactttcttcacggccacgtccagaacccccttcccggagtgtcacggcgcgagcgagatccctcctaataagcttcgcgagggggataggattgctgggagtacctaagaagtacgccctagtatccggaaccggcgaggcagatacgtccctagcggccttcgacgccgcgctgatcgatgcggggataggtgactgcaacctcgtggagctgtccagcatacttcccccgaacgctgaggaggacgaccttccggagttcccacccgggtccatagtgccggccgtagtagcgaaggccgtgggacgcggcctggtgtcgagctgcatctgcgtaggaaggctggagtccggtctcgggatcgtttcggaacgggccgccaccgatagcgtagaaacggttcggaggctcgctaaaagggacgtcgaggagatggctagactccgcggtgagaagctcgtggaagtgcgcacggtcacggcttctaccgagcccgaggacgcggaatgggcggcggcggtagcggcggtggtcttctgggggtgatctcgagtgagagagaccgtcgagaagatcgtcaaggagcgggttttaccggaggtatccaaggtacgtcgtggttgggtcgaagtcggtaggggtgcggacggaactccgacgatgcgggtggacgaggtagcggagcgggagttcctccgcgggttagaagaggagggcgtggacgcgagggtaatcagcgaggaatccggtgagatgcgtgtgggtgaggcccccgaggtaacgctggtcttagacccgctcgacggctcacacaatgccagtcgcggtcttccgttctactgcgtttcagtcggtatcgccgatccggaggccgagactctggatgacgtggaagagggtttggtggtttcggaactgctgaccttcggtcccggtgacgtcgaagagaagccggtggtggaacgcccgctggtttcggcgtactactacggatcggaccggatgccggttgagttctcccggggtcgtttcaagctccgttgcttggggtcagtggccttggaactggctttagtggggaagggagctctggacgggttcgtagacgttcggggcagtctgcgccctacggacgtagcgggggcattcggagctgcgcgaggtgagctagccttcatattcgcgcggaacggtcgggagctggatccttctgagataccactgcgaccggacttccgcttcgaactggcaacggcccggagcgaagatgaggctcgggagctcttcgaggccctgaaggaggacgtgggtatccgtgtggcgcagcgtctgttcggtaagcatcccgaaggactctcggaacacgctctgtgcggtaagttaggtgaggaatgctgcgaactggctcacgccgtgggtaaggaagaggggtacggggaggagctcgcggacgtgttcgctctcgtcatgaacctagcgaacgagctcgacgtggacgttttgacggaactgcggcgtaagtttcggagggtgttcggatgttccgaccgcaggtcgtcggtgtgaccggcagaacggacctgggtagagcagtgcgggtcgcggagagagtgtgtcgtctttgcgaccgggaagggttcgaagtcctagtggacgattcgctggggatcggcgaatacccccgggttaacttgaaagacatgggcaaagaggtcgatatgatcatcacgatcggcggtgatgggaccatactccgcgtctcgaggattacgtcagagtatgaggtgccgatcttgggtgtgaacctaggaaagttcggattcctaaccgaggtgagtgagagtggcctgaaggaagccgtatctcggctcgctcggggagatttcaacctagaagaacaccgaaagctcaggataaagatagggggatccgacgaaggagacgctctcaacgaggtcaccgtgatcacgagtcgacctgctaaaatgatcaggtaccggctgtccatcgacgggttcgagttggagaccacgtgggcggacggtgtactagtggcgaccccgacgggttccaccgcctactccctctcagccggaggtccaatcgtggagccacaggtggagtgttccattattactcctctgaacccgttcaagctggaggcacggcctatggtggtttccatggaccgacgcgtggagatcgacgtggacgaccctgagcgtgccgaggtcgtcgtcgacgggcaggagtacatgaatctcgacggcacggtgtccgttacgcgatccccgaacgtggcgcggtttatacggttcgggtcgacgtacttcgagcggttgaaggaaaagttcctgaggtgggattgatgtcgctacgcgacacgatcaaggaaatcggtgaggcgatcttccgggcgtttctagtgggaccactgcctaggctcctagcgtgcgtgtgtttcaccctctggatccacctctaccgcgagggtcgcgaatggaagagatcacatcgagagtagctgccgctagctcgacgtcttccgcctttacggtcttcctgcccgcgtgacgggccgcgagaaccgacaactccgccagtgctaggctgagggactcgatcacccgatagtactccttcttggcactcatcctgacgccgaggactccgtcggcggatcgggccgacttcttgagtatctcttccagaacgttcgtcgggagatcggggtccaagctttcccctcccctggggtgctcggggggactcagttgaccacctacgtcctcgatacatcagcattaatcaagggtgtgcctccggagctcctggacggtcccgcttacacggttccggaggttatcgaggagcttaaggatgatctttcccgcgtgaggtatgaggttgcgtcggtaagggtcaaggaacccgaagactgggcggttcgccgcgcgcgcaggcgcgctaaggtcacgggtgacctacctcggttgtcgaagacggacctgaaggttctcgcgctcgccatcgagttgatggaagagcaggacgtagtcctagtcagctccgattacagcgtccagaacgtggcgcttacactgggtattcgggtgtacgggcccgtccacggcgaggtggacgaggtaatcgggccggggggacgacgttggagaccgtcggtgtaacgacagtcgtgacggtgtcggggttgacggggtcgaagcgtgtagcagcccgtgtggataccggtgccgagaacgactcgatcgacctgaagctggcgtcggaaataggcgccggccccgtcatcggggtgaagaaggtccgctccgcttccgcttcgcggttacgctccgagcgtcggcccgtggttcacgtcactttggagctggccggaagatgtctaccctcggaggccacgctggcggatcgccgggatatgcggtacccgatgatcgttgggcgtaagacgctacgccgggcgggggtcacggtcgacccgtcccgtgaggaggaaccggagggggacgaagtcgatccacgtcgcgtagtcggtaccttaaagcttcacaaaagactcctgaggaccgtcggagagaagcgcgcggtgacccctgccgtcctggcacttcagcacgggggagcgtggtcgtaccgcgacggtgatgtatcgtcggtggccgttcctattcggaaattgtcgaacggtgtagtgcgtgaagatctctacctgcttctcaaccccgagatcgagcgcgccgagggtacgttaactagactcgagaagtgtggtcgcgagagagttcggcgcgtcgcgaagcgtccacggcggcttgaagtacgacatgatggtggcgccatcatccgcgtcgatccggggcgtagacgcatccgtgttcgggagctcgacccgggaacgctccgacttgaaggcattcccgccgccaaccttcaccacgagctctctcacctcatgggggacgacctgggccccagcgtgctggagttcgaggtcgagtgaagggggacaccattaccgtgtcggagacgatccgagtcgccactcgatccagccgtctggcgattatccagacccgggaggtaatcgagctgctggagcgggaatccccgcgtgacgtcgaggttgagatcgtgaagacgaagtcacgtggggacgtcgttcgggatcgacccctccacaagctgggtgagaagggtgtgttcgtgaaagaggttgacaggctggtactcgaaggtaaggccgatatcgccgttcacagcgccaaagacgttccttccgtcgtagattatcccgtggatgtggcggctgtgcctccccggagggacccccgagaatgtctggtgtcgcgacacggcggactcaaagaacttccgcggggagctaccgtggggaccagcagtcctagacggcgcgcgcagatcctcctagaaagacctgacttgaaggtggagccgatgcgcgggaacgtagacaccagggtctccaaggtgaggcggagggagtacgacgccgccgttctcgccaaagtcgggttggaccggctcgggatgacatccgaggtttccgaggtgtacgacccggaagagttcgtgccgccggcgggccaaggggccctgatgatcacctgccgcaaggacgacgatcgcgttaaacgccttctggaagtcgtggacgacgagaagagtcgggtggaagtcgagacggagaaggccgtcgtgagggagctcggagtgggttgctcggagcctgtaggagtccacgtgcgagctcgcgacggtgatcacgtgaggttggtgctgggactgttcgaagaagacggctcttgcggccacgtactcaagatgcggggctcgcctgaggacgtcgtccgtgaggcggtgtctcaggctagggaggtgttatcggatgggtgagctgtacctggtcggagggggtctctccgacgttcgagatctcacgctgcgggcccttgaagtgctagctagcgtggagttggtgctggtcgacacctacaccagcgtgtacgacgtaagcgagggcgacctgaaacggttgctcaacgggttcggaggtgatcctgaagtacgtatgtgctcgcggcgggacctggaggagcgcttcttcgacctgtgtgaggggtacgatcgcgtcgccctgctctccccgggcgacccgatggcagcgaccactcacgtggcgctggtggtcgaggccgccgaccgtgggtgggacgtcgagataatcaacggcgtatcggtgttcaccgcggcaccatccaagtcggggctggaaatgtaccggttcggacgtaccgccacgattccgttgaacgtgcgctccgtgtatccctacgatgtgctcgaatcgaaccggcaggccggtttacacaccctcttcctgctggaagttgctgaagacggggagttcgtctctgtcgctgacgccgcccgctacctattggaaattgagagggaagaaggtcgcggagtactcgacccctcggatctcgcgatcgccgtagtgaggctggggttcgaggacgagttggtggcttggggaaccctcgaagaactctccgactgggagcccggtgaacctccgcaagctctaatactgcccgcctcccgactccgtgaagcggagcgcgaatacatccgccgcgtcctcccacacatccgagatgtgcgtggggtctagcctttgggtgaggagactggcggtgactatcacgtcgtgctcgaggccgcgtggatcgtgtacaacgtcgacgacgaggacgacgctatcaacatcgccattgccgaggcgggtaagcgcttgaaccgacacggcctcgattacgtggatatcgatgtcgggttttacgagtgtcctgaatgtggtaatgaaatcgaaggtgtgtggatagtagcaggtacagccctcgtccgactgattctatcgatgcgagtgttcaacgcggaaagcgaggaacacgccattcgcatcgctaagtacgagatcggtcaagcgctggaggatgtacccttaggtgtcgttgaagtaactccgctctgaccatttacttaccccttacgagatgcgcccatattagcgccgagagcaacgtgaacgtagccaaggcgaaggagttcatcgccctagagaacaggaatactcctatcagtgattggactgagaacgcgatcagacaaccgaagagcatggcctctctcgccaggaatctcgccgtcatcctacgccttcgtagttttatgtactccgagaggcacctcgatcccacgtatagtgtggccgcgacccatatggacagtaataccgccccgatgtacccgaagtcgaaggcccaggtgaacaagccaggcagcatgtaatcgagaaggtcctttttaacgacgagtgctccatgtagtgtaggtacgtcgagccggaacatcatgagatatccgacaggcagtgtgacgaacccgtcaccgaagccccgccactcgtatccggcgggaagcgccttcgtggagtgaccgatgatgtgcgtgttcttcgccacgaactcgagtcccggtacggtgtattccgcgaatcgcttgatacggagtgtcgggctgaacacgggcttattcaggacgtaagcgagcagttccaggagaccgaggaaacctatggccatcagcgtggccatcacgatcgaccttttgctcatcttagctgctcgggcggcaaaagcgcggaatctcgactccactttcaagtacttcgctatgaaatgctccgtaagcgcccagcataggaaccaggagagtaggaagtcacgatgcataattcctccgaccattcccacgtacacccataggagattgaagtatggccgagtacgtcgggccgccgtgataccacgggtttcgagcagttgcaggaggtacctcgaggtcgcccaagcggcgagtgccagtgggccgaacgggtgcgtaaactcgtggcgtgatacggggaggaacagcgagaaagcgtccacggtgaatagaagggccagcactcccagtgtgaagagggacagtgagaggaccctctgtaccgttaccgaggaatagctcagggcgaacggtatcgtcaggtgggtgatcacgaagaagtccaggagggcttcacccgtgttataggggaccacgtacaagttaccacgcccgcagcctccgatttacgagctctctgattcctccgagcacgatcagcgcaactcctacggcggagctgattagaccgagggagtgtagtgtctcaggggagatcggggtcttcaacggcggctttttgtacccctccggtagcggacgcatgtagatagtgatcaggttggcctcgggttccactttgacatcacccggtagtatgtagtcgtaccccaacagtgtgttgttgtctatgtcggagtcgatcgcgcgggcgatgtcctccggctgcttcttcccggcttggaccagcgtctggacggtctcgactatcgacactttatcgtacacgctcttgatcccgtagacccggacgatcggctggtccttccttaccgtgatcatgtctcgggcaacctgccaggcgtactccgttcggagggaggacccacagacgggacaccgcgagtacttggaggccgccgggtaggcgacgctccatccacatttggggcagactttacggtaggctgtgtccatcgggatgccgcgcgcgttgagcttgggcgggacgaaagtgtcacccgtcgacagaccggcggtgatgttgactacaccacctccgtacttctctccggacttcttggccacgtaacccatgatcctcgtcactatctccgtcgcgggtagaccgtccctgatcatcctgccggccatgatggcggcctctattcggaccttcgtagcggtgccgtacatagggttgcccggcgtgttacgcaggtggattacggcgcacttgacgttcttgggtatacggacgatgttagggcctccgctgctgtggtactgcttgatgatgatcttgttccctttcacgatcaccacggcgatatcgtagcttccgcccaccgcaacgcccttcccggggcctccgaccagaagtcggtccgtgggtgaccggctgataccggccctcacggcactttctatgtcctcacccagctctaacgcccgtatacacgccaggatagcctccaggcgtgccgtacccttgctcagacctcccgctaggacggctacgtgtagcttcttggacactaggaacgtcgactggaacatgttaggagcgaaggacatcgaggctgcggctgcaccgttgggatccttgccgctggggtccgtgatcacgatcatgttgaaggtagcggacgccccggagaccagtgccaggagcgcgatcagcgggatcagcacacggatcgcggggtcccccctacctcggcagtccgtagtcttcgatcacccggaccacgacgacccctgatcgtttgatcgtgatctggacggatcgaatgggtttgatcttcgttcccgggatcacgctcctcatcgcgtatatcctcgccctcctgatcgcctcgtgcagcgggattttcttgccttccggggtgatgagggttccgcccttgataaccgaaccgggacgcaggcccgacgccatcacgttgctacgtatgacctcttccggcaggaaatcgcagccgactacgtcgatacctatgatcctgagtccctcttgcttgggtaccggacgtgccgcccacgctgtgtactccgcgattcttccgatgctgaggagtagagcacccatcagcatgatcgccaggttacgccgggaaacgggccacggtttgatccacttcctcttcctttcctcttccaccgctagatcgcccccatatcgcgcaggacctctcgagcaggttccattccttgggctcctcccagtagaatcacggtgtcgtcgtccgccaagtccagtgcgcgctccaaagcgtcttctaaccgatcgtagtgctcgtagtcgatgccggagcgctccagttcctccaggaacgccctccgctcctcaggccgcactacgttagcatcgtccacgaggccctctgatgaggtcgcgatcacgtggacgtggattccctcgtcctgtagatccttcgcgccttcagccagcgcccgagcgatttgacggttaatgtcgacgccacgcgacccgcggatcgcgaacacaacaatcaccttggagcgacccaaccgtcgcagggcgcgaacagtggcgagtactccgtcgggattgtggcagaaatcgtcgtaaatcagcgggtcgtcgcacaggcgttcgaacctccgcttcaagggttggtacgtcctcaagccttcggcgatatcctcccgatctattcctagagctcccgcggcggctacggcggccaacgcgttgtacaggaagtggtccaccggtagggggaactcccggacgggtattaggggttcttcgtccagtactatccactcctccccgtcgcgttcctcaatgtgggagtatccttcgtcccatccgtaccataccgtctccacaccttccctggtcatccgccgtacgtaccgatcgtcacggttgagcaccgcgatacctccctttcgtagggcccgcacgacaccgtatacagcgtcaaccatctcttccagagaggaaaccaggttcgtgtggtccaccccgacgttcgtcacgaccgccagctcgcatttgagggccttcgccatccggtaggcgtggtcctccattattcgacccgtaggtaagccttgtacctcagatacctccacgcacaggtaatcttccggccgttcctcgcgcaactccatcgcgaccacggggtctatgagggtgttcttctcggaacggaaatccgtgttgcagtaagcatcgaagccggcggtatcgaggatgtggtgaagcaagtgattcgtagtcgacttaccgttagttcccgtcacgcagatcgcggtagcgtcaggggcgcacttctcacgggctacgcgcagagcgtactcgttcgcccgatccacctccgtcaggatcaaggggattccgagctcgtcgcatctctcgatcagcttgccgcgcgggtgttcagtcaccagacatgccacgcctctctccgacgcgatctcggcacctttatcgtccaaccaccatcggatcactacatctccttctttcgcccttcctaacgtggagaaccatccggcgatcatactatccgggtcgcctgagcgtatttccccttccacattctcagccagctccctcaccgtgagcttcagcagcgcccctcaccccacggagatccagagtgccacggcggcgaacaccgctccggcggtccaatggagcgccacaaccacgggttcgggtaggtcgtacttgtactggatatggtggtggagaggttccacagccaaccggatcacgccggctcggtgaagcaagctgatgagcgtggacagtactgggactcctaaggcgatcatagcaggtatctcgatcttgtaatatagtgctcctgccgcgtaagccgcccctaagaagcaactccccgtgtctcccatgaagatcttagccgggtatctgttatggaacaggaaacccagggacgctccggcaagtgatgcgaagaaggcagcacccggaagctggccctgtcccaggcatacgccggagcaagccagtgaggccaggaacagcagcccggcggccagaccgtccatcccgtcgatgaggttcacggcgttggtagcgccgacaattccgaacaccgcgaccggatagaaaaggtacgagaggttccaaacgccgaccttgggtatccagagccatgtggcggggacgataggaagaacgaagagggcggcgccagtctgtagtgcgagtttctcacgttcactcaattctttcttgataggcacctcaccgacgatctcgatggcatccgggtcctcttcgagtatcctcttcagatcacgtttcgctttctccgtggctacacgtgcctcctcgcccggttgtagtatgagtcttcccagctcgatcggtcgattcgagacgttccgtacgaccttctggaactcttccacctgcaatccgagcaggtcgtccactattcctagcaccatcatggggagcgctgaagctataggagggagcgcctggatggaagctaggagggggccggacgccgttcccagtaagatccccagacctcccatgatgggcatgccggacttatgcgcgtgttccgttacgatcgggcggtctaccacgttagcttcccgcatgtacttgcggagtaatccaaccgttacggccgaggttactgtggagagtgtaaacgtctcgatgatcatcgtccgctccccacggtcataagtactcctcgatttccctcagcctccgtcgatactcacgttcggcccgcttcacgtccgctcctgcagccttgagcgctgagcggagcctcgtgagggcttctttaaaagagtcccccctcacggtgacacgaccacctacgtcgaagcgtccatagtactcgtagaacacgtggtacactccgccgtcgaacatctcacgcaggggatccttgtccgtagggcgccaaacgggacactcgatggcgcaccataatttccttatcttcggtggcctccatcgatcggccgccatatcgaccagctcacggagcggccatattcccgtgcatccggacgtcatgtacctggtgccgctgggtctcgggttgaactcgaggaaccagaactcgttctcccggactaccacgtcgaagtccacgttgccctccagtcccagatgttccacgactcttaccgcgcaccttcttatcttgcgctccacggacgggtcgatcggggccgggctcatccgcatacgatcgatcggatgacgacggtccgccgtggatcctttgaacaccggaaccagcggcaccacctcaccgtcccaggatagaacttcgatcgaaacttccgcaccttcgatgaactcctctaccagcttacgtcccgatactctcggcttgtgcgtctcgtggaccgtgactccgagccccgcctgtgaccgtggatccttcacgactaccggtggactgatcgatggcctttcgttctcgacgacttcccattcaggcgtcggtacgttcagttcttcgaaggcgcgtttcgttctcactttatcgatcccgatttcaacgctctcgcgatcagacgccacaacccggataccttcggcttccagctcttctttcatctcccccactgccggtagcggatcgtctacaccgatgagtggtactacaccgtctacgtgccgctcgcgggcgattctcgtgggatgttccataccgcgcggtacgaagtgcacctcatccgccagctcccagtccctgctcctcgggttcgactcggtgagtatacggtacactcccgtggagccggcgtactccgccacgtcccggagtagcctcgcgccgacgaagagtaccttcacctttcgtcccccagcactcgctcgacttcttcagagatctcttcccggtacttcagcggagcctctccgaacaacactaccacttcgcagtccgagcggagcgcctccttgagaccgtccaacacctgctcccgagaggcacccagtgtacccttcttctcgaacggcttggtggcgctctccgctgcgatcacgttgtcggcgtcgacgcggtccatgacttcgtacgccgcgtacgatgccaccaccactaggtcggcgagatccgcagctcttctgagtatctcttcgtctccttccggtcccagctccgaagctacggcgattaccgcgcagacgcgccgctcccggtaagcctccttcacgcatctcaacgtcgcgtccacgccggcgggattatggccgtagtctaagatcacgactcgctcgccgtcgtcccagagtacttctaacctgccctcgactccttcgaaggactgtagcgcctctaccacgtcctccacatcaagtcccaagaactcggagcagacggctatcgccgcgagggcgttgtaagcgttgtggagccccatcacgggtagtcgaacctcgtactccccatcgggacagatcagtcggaacccggacaagtcaacgtccgtagctaggtagtccggctcgggagatcgcaggccacactcccggcacttgaagggaccgacccaagggaggatctcatggacttcaacgtgtccgccgcaccagcactctttttccgaggtatcgaacggttccacgtccaacccgtagtacacgatatcgccgttgaaatccaccacctcgggggcaccaactaccaacgggtcttgagcgttcagcacggctagctcgatggtgtccggctccaacagttcggcctcacatctggcgtacgtcaggaaatcgcccgcctcgttcagatggtccggggtgatgttggtaacgcagacgcactccacctgggataactccgcggcttccaggatctcccctctcttcccgaaagttgctatctctaagacgctgacgtcccctgggagacgcgcctgaagtggggggagtaatccgacgttcccttgcatgcccggcaaaccgtggtgcggggcctcgagcccgagttgctcgcacacgtgcctgatcatcgccacagtcgtggtcttcccgttggtcccaccgactccgatcaccggtcgtgtgggcggtaacatgtcgaggagctccttcacttccacgatttcgcagccgtgatcctcggccagtcggtacggcttagcatcgcgtgataggctcggaggaggtaccacaacttcggctcgttcgaagatctcgggtgggtggcctcccaatacgagctccacgttactgtattcgagaagcgtctcggcgaactcgcactcatcccggagatccgacgcgatcacatcgtatccgcgctccgcgaggacccgggccgctagattgcatacgggcccacagaccccgatcacgagaacggtcgaccagggaagttcggccaaccgcgcaccccgccgaggggctggggacgcggtgagttgaacctgtcggggatcacggccgcgctcccggtatcgttcggccgtactcggccagtatcgacctcatgagctttttaacgtcgcgaagaaggcgttcggcttcctccctgtcaccggtcgctaaccgtacgaacgcttcgatatcgaggtgttccacccggtcgtcgatctttccgtactccgacattacgaagtacagttgcgtgaacctctccctccgctcgaccctgttgagggttccgcgtaccagcgacctcagggcttgacgtgcgtacatgagcagccggtacgtgaggtctcggatgatttcatcctcatctctcggtccgtccgggataccgtttgggaacgctgctttctcttccaaccccaagatatccagcacgcgttccggatcctcctctggggtctccgtctcccggaggtacgctagggcctcttgaggtgttgccacaccttccagcatgatggtacatgcgcgacctgtcagagggttgtacccgacctcctctatgaacctgtgcacgccgtacggacggatcggacacgtgtactcgggattgaaccagcccagactgctcacgatatcgcggatgtcttcccacgtccaccgacggagtgccgggtaccggaccacggtgactcctggagggtaggggtgggtagtgcgtctcccgaacttcccgcggagctcgtgaccggtgaggactgttgcgcatcctagttcacgggcgcgaaggcacgcggcggttaggacgcttctaccacacttcgtacatatcgggcgtccttccttcagagcccgcgcgaaccattctcgaagtcgtagcttgaccacctcgtgatccacgccgacgtgttccgcggctttccgggcgttctctaaacatgtcttatcggtgaactcgtggactactgttacggctaccttaacattccacctatcggcggcgtctatcagcgtggctacactgtccttaccgccggaaagtgctatgctggagggagggctagtcatgcgcgtacacagcccttaccccaccgctggagacctcttcgagtcgcacgaagtacagccgttcgaactggacggtgctgccggcctgttcgcgctcgacgttaatttcggcgtatccactctcaacgctaccgtccgggcggacgacctcgcaccgtactgcctggtcgggcggtacccagtggacgatttgagcaccttcctctttcgcgattcggtagtcgtcgctgtgatacctgcctcgcaaccatccgtctccgacttcctcgatctcgacgttgacggcgttcatcagccgaactacgtcgccctcccacaggtcttctgcgtcttcaccgtccaacagtgctcgggccacgccgttctcaggatgtagaattaagaccctctctccctcatcccgatcggggtgtagaggcagtcgggccaggaccgactccttcatcccttcgatccgtaattcgacaggatcacggacgaagaagtaccggtgagactcagggtcgatcatcttacggttccgagcgtaaagatgctcccagctgaacgtcgcgtccacgtcggtcaggccgatctcgaggatagtctcacgtattgcttccggcttaataccccggcgtcggagggcgcgtaaggtagccactcggacgtcgtcccaccctgtgtactctcctgaatcgattccacggcggatctcggaagtgcttagcacggcaccttcaaccttcagaatcccgtagtgaacgtattccggagtgtcccaccccagatgctcgaacacgtacttctgacgccgtgtgttggactcatgatccttcccacgaagtacgtgcgtgatgttcatgagatggtcgtccacagcgacggcgaagttcatcgtcggccacacaaggtaccgagaacccgtcatcgggtgctcttcttcgacgatcctgaacgctatccactccctcaccgcgggatccgggtgatcaacttcggtcttgacacgtacgacggcttctccttctgagaaagtaccgtccaacatctcctcccagagctcgaggttctcctccttatcccgagagcggcacgggcaggctcgccccacgtcgcggagtctccggaactcgtctggatcacaggtacaaacgtacgccccttcccgctccagcagctcctcgcaaaccatgtaatacagttctatcctgttagactgcacgtaccgttcgtcgatgttgactccgagccactccagatcctcttcgatcatgtcgtaggcctcagggtccacgcgacgcgggtcggtgtcttcaatgcggaggactaaggtgccgtcgtaccttctagcgtattcgtcgttaagtactgcggcacgggcgtgacctatgtggaggggacccgaagggttcggtgcgaaccgaaggcgaacgttccccggttcagctccgggaaggggtttgagcccttctttgtcccgggctacgtcttcgcgcggtcctccgagttcttccagctcgcgtctgatttcctctccggacatcttgttaacttcgcggaccacctctctgacggtcttcaggacttctttcgccctaggacgtagctcttcgtgttccttcatgatcttcttcatcaccgcgttgggattcgccctcccaccgtatcgggccgcgttctccagagcgtacctgcggacgagatctcgaagttccttctcctccacggtccattctccccgagataatcagtgagggggtgtcccccgtcctccggccccgggatcatcgacaggcgacggccttctcccccgggggacccagacgggagtcatcttttgcgaagtctggccccggacgccgccgactcattagccccttaattacgttctccccgctacggagaggcgcagtaccgggcccgacccagacccgaaatttctatatagatcctcgagggtagttcggttcgggtcgggccggcagctcagtctggctagagcgcgggacttttaatcccgtggtcccgggttcaaatcccggccggcccaccaaaatgctcaattgttatgaagatcataacattcgaacggttcggggtaaaccttgtgtgggtcgagttcaatcgttacgatttccataacaattgggttggaggaaggagttgacacattacatccgctccagcgtcggaattccgaggagattcatcaggttctccgccacgatcgtgaatgcctctacgagcttcagtcgcgcctcccgtacttcatcgtcctcaacgtgcagcacgggaacctcctcgtagaacgtgtggaacgtcttcgccaggtcgtacgcgtactcggcgaggatgtccgggcgccgcttgcgcacgcactgggctacgtggcgtgggaacttcgacatcttgaggatcaactcgaacgagtgatcgtcgttcaagtatgccgcatcgaagcggttcacctcctcgtctgccttccggaggatcgacttggccctcgcgtaagcgtactggatgaacggtccaccacgacggaagtcgagggcttcgtcccagtcgaactctatcggtttgttgggactcactctggcgatagcgaagcgtacggcccctatggcgatctcctccgcgatcttctctcgctcctcgtcgctcagttcctccgctacgcccgctgccttcatcttctcgagtgcgcgcttcttggcttcctccaggaactcgtcgagcgtcacgtatctacccttcctagtagacatcgatccttccggcagatggatgaactcgtagaacaccacgtcgatacggtcggggttctcctcgagcatgtccagtacggcccgtagctgttcgaccgctaacttgtgatccgctcctagcacgtctaccacgaacgtggctcgtccgagcttccagaggtgataggcgatgtcacgggtggtgtacagcgtagtgccgtcgctgcgcgtgagtacgagctccttgtcgattccgtagtcttccaggtcgactaccacggctccatcctcgcgctcctccgcgactcccatgtccagcagcttctccacgatctccagtgcatcgcgcgcgaactcgctctcgtacacgaatcggtcatgcgccacccggaggcgctccagcgtttggatgtgccctctcagacactcctccactacggtctggaacgcgtcggcgatgcgctccgctcgagattcttcctccactaggtaacgttcgtacgatctcaggaacctctcgactacttcctccagctcgggatcttcctcgatctcacgcgcggcttcagtgtacagcttaccgaagaactcgtccggtttttcgccctcgggtacttcgggccgcccctcctttatgtacttccacgcgagcatcgcgatctgcttacccatatcgttcacgtaatactgcacttccaccccgtagttcgtgaagaccatgcacctcgcgagaatgtccccgatgacagcgtttctaccgtggccgatgtgtaaaggaccgttggggttcgcgctagtgtgctccaagattacggggcgacccataccgaggtcgagcgagccgtactcttcgccgtagtagaatatcgacctgagcgtcagcgccgcgtactgggacctgtcgagcttcaagttgatgaagcccgggccttccacccaagccttttccacgaacaccacgtcgtcgaggtcagactcctcgacgatcgtttcagccagctctctggggttctcgtccagctctttagctagggagagtgccaccggcgtggccagatcggcaccttcgacgggtgggttctcgtcgataggaacctctatcagctcgtctacttcgtacacggacgagatcgcgtcccggatcgatgttcttatggtgcgaatcgtaaccgaaaacgggtcgcgaggtgtggtttcctcggccaacgtgggcgaaccccttcacttgggtcggaacctgagcagggctccgagtccccgaaacgcgttataaaactgagcgccctcttcggtctcggttgagatgatctcgacgttggatcccatctgctcggccagttccacgtagtaatccactatgtctttgatttcttccacgttgagctctgcttccccgcattccgggcactcttccacgtatttcttcgcctcgtctttctccttcaccgtaacgatgttctcgtacccgcactccggacatcgtaggattaccttgtatccctcgaggtcctcggaaactagcagtacctccacggcacccatcttgaggagttcgtcgacttcctctccatacgccgcgagttcaccgttcacggcctcctccatgaactttcgcacgaggcgcttctcccggactagctcggcttccttcagcgcttcttcggctttgttcagggcctcccggagcccggactcgtccgtgttgccgacgtccaccacggtgagtaccttttcctttagatccttggggaggtagtcgccgtccaggaactcctccttcgtgggacctggacctccgacgatgattcccttcagatccttcacgtcttcgaaagcctcgcgggcggcttctcccaccttctggtaaaactcgtgggcggcgtgctcgatcaaccggtcgaacctacgctgagattgacctccggccttatgcttacccggcacgtcggacgtcagcctcttcacgggttcgattcgcttacctttcacgagacctatcgtggcctcccggcggtccattaccaggattccgtagacgtccttctcttcgaggtattccttgaggggttctagatagaatttcgaatcacatcggtagatgaaccggtccacgggctcgggcggttcgatcagctccgcgaccatcttctccttggtaccgtcctggacggtgccgacgagaactacgagtccgttttccggagtctctccgaccattttgagacgctgcatcacgacctcgatagctgattggacgttcttccgggtgcgcttactcttgatgttgctggcttgggagtactcctcccgcatctgagcgatgacgtcgctcagacgattctccggcgggatgtaaatcgtgatgagctcggtgccttgtccgcgcaggttttccagtctctctatcatcttcctgaacctatatctctcgaccgtagacgattcggccatcgtgaacaccccctaggggtgagacagcatgtattcggtcgtggcactgggtggctcggtcgtaaacgtggataaacccgaacgcatcaaggaaaccgccgaaatcttgcgaaatgggctcgattccgggctgaagatatgcgtcgtcgtcggtggtgggccgaccgcccgtcggtacataaacgtagcgcgaaacctcgggacaccggaaactctactcgacgagatgggtatcgccgttacccggctgaacgcgatgcttctaggggcggcgttgggtctgcacgatctgcacgtgcctgagaccccagtagaagccgcgagaatagtccggcggaacggtgtggcagtctgcggtggtacacatcccggccacacaaccgacgccgtagcggccatgatcgcggaactgctcgagggtccactcgtcatagttaccaatgtcgacggggtgtacgacaaggaccccagtgaaccaggcgcgcgcaaactccgggaactgaggcccgaagagctggaagaactggcagtccgcgctgagcttaaggcggggggaagcttcgtagtggaccccctcgccgccaagatgataagcaggggtcaaatcgtcacgcacgtggtttcgtgggaagacttccggtcccgtgggttggaaaacgtggttcgaggccgtcataatgggacgataatcgaggggtgaaagggtttgacggagcgcgtacctccccactcccactgtatcgtttgtggggccgcaatcccggaaggggagcgattttgcagcgagaagtgccggatggaatacgaacgtaggaggaagaaggcggcgacactccagtggatgctggccggagctctcatagccctaggtgtggtcctgatgctccggggtgtatgagcggagtgagggcaatccggctccgcgaacgccgatcaacacgtcaccgggtgttgggagctcgaggacgggacagaacacatcgctgccacccgcgatcgtcccttcgtactccacccaagtaaagaacgcgtatcccggctccggagtttcgtactcgaactttttggggatgggtttgtcggtccggattacctcaagtggttcgatgtcttctgggagacccggccgatatctcggcgtcctaggtggtcggcggatagggttggccccaatccgcacttcctgtggcacgatcgtcggttcatacctctcgagaacggcgttgatgacgggtacgaacttctcttctaggagtagtgtgtcgatcatctcacatgctaccacatcggcgttcacatccacatcccgcgcgtcccctactactacctcccactccacgtcgtgcgggacgtgtttcctgaggttcttctcgagaagtcgggctcgtttgggattcttttctacggcgatcacgcgctcggcgccggcgtgggctgcaaccaccgataaaggtcctgtgccggctccaaggtccgcgaaagtgtcctctgcgacttccgctaccatcgaggtgaagacgaaaacgcgccttacgtcacggagcaggtcgagctggtaggagtctaccaacagcttgaactcacctactggagttcttatggttttaatcattcgtcactcaccacatccttagcttcttcgggtttctcttctttcccctctgattcccgctccttgcgcggtttaagcttgattacatagtctgccgcattttgtagtgctgtactaaatcctggatctgctcctattacaatggtgaccttaccctgctccttcgccttagctataattggaagaaagtcagtgtcacgcgtcattagtgcgattgcgtcgacgttatcactgtaaataagttccattgcctcaaccgctaagtacacatcaacgtctcccggaatcactctaggaacaaaaccctgattggctacagcttcaataagtttgtccgaagcgtattggttcaggaacgctaatcctactctaatattacccaattcttcaactaattctctaacctccttcaaactgacatcgaactctttacggagcatattcggtccgtcaatcaacattgcaatgtcaagattgccccgcttagcttttctcttgattacaccactcatataatctttgaccgtatcgagcaactcatcaccacctccagtcggttaacgtgctgggcgctcgggttcatagactctcaacttacactctccaccgggagagaagtggtaagggaactcttccacgacggccgcgtctacgaccccctgtcgcgtcaacacggctgtaaggtgagggcacgactgagagtagagcactacagggcccttatgagaagctaggaacctgcgcaccgaaccgttggatagtaccattcccgtagagagcaatacggattcaccgaactttatattcctctcgacccggagacgtggatcctcgtctacgatctgaaggagtattccgcgatcccgtagttctcgcgctatgtgggcggagtatcccaccagtatcacctcatcgccgagcttttcggcggtgtcggcgacgatcttcgctcggagggtaacggctctgccgtagtccctgggcaagctgatctcctcctcaggctccacgttctccgcgctcgccaccgcatcgagggctgcgctccgggcctgaggctcctgaaacctgcgccacacttccttcagcttcagtcccagtatctcccggagtcggaggcatttctcggggtggagtgacgctccttccagccctctttccgttttgattagcgtaacgatatcgtcgtggacgcggtctccgccgggtggcctcctgtatccctccagggcgagtgccgccgctactcggtcgttcttaccctccgctatcagctcccttactaccctcgaatagagcttccagcgcctcttcatcgcactcccccgatccggacctgcttccgacctgtacctcgacgcgaccgtagtcccggagggctctcttgactggaccctccggatccccttcacctcggacgtccactaggatcacgtactccacggcgcggaaggccccgacgatgtcggatcctcgggttgctcgcaccgacaacacgtcgaagccggcgcgcctcagggcttcggatacttctttctcgagcctccgctcaggaactggtttgtgggaaaggaggtgcacgtcgaccatcagctcgctcaagcctgctcgacctccagtcccatccccagtagctcctgtagcacctcctcgacgtaccgcgcgtacctgccccgctgtcccatgaacggtccgaagtccttctggtcgatccataccttcaggttcggaccggctatgtccacgtccacgatacgttctcctatccacggcaccgggtggatgtccgcgatgaagtcgacgaagtccagtgtgaggtgcgtcacgacgatcctcatgttcgtctccgcctctatcctctcgatacgctcacctcccgttcctacgacgcgacctacgtggccttccttggtaacgatcaccgcctgcggaacgttctcggtcttgatctcgaggtcttccgcgatcggctccacgtagagcaccgtgagcacgtcggcgtccggtgcctcgacttggaccacgtccatgatctcccgctccacgtcgttcatctccctgttacggacgcggatttccagctgtaggtgcacgccccgctcagcaccggggcgtacgatgtccctcgtgcccaggtccacgacttccgccttgggttcctctgccaagacctcacgcatcacggtggctccgcaccggtcgatgtcgacgtccttctgaagtaccgggtcgccggtgatcagcagtcgggagttgtgacccattcgcgccagcacctcacccgcgttctcgggcagcatgttctggacttcatccagcagtatcacggcgtcgtcgaacgtgcgtccacggacgaagtgcgtatccacgatcatgatcttgccctcgtccactaactgctggagctcgtcccgcccggtgaaccgtgagagcacgtccatgaccggggtaaccaccatctcttcgaacttctcgggcaggtccgcggagctcatctcttgcttggtggccacgtcgacgagtggacgggtcactatgaaccggtcgtactcaccttccatcacggcctgcacgccgtacgccgcacagaacagggtcttaccggtgcccgtggggccgaacacggccactatttcattctcctcgtttagcagcgcttcgaccagtcgctcctgtccttcggtctgcggctctacacccatcaactccttcattcctctccccccttaccgcccgaatcttctttcacgcttctggaattcacggatcgcgcgcagcaagtcaatcttccgaaactcaggccagtacacgtccacaaagtacagctcggagtacgcggagtaccagagcaggaagttgctgagtctttcctcaccactggttcttatgatcagctccggatccgggagatctcccacgtatacgtactttctgaacgttccttcatcgatctcatcggggtcgagccggccgactttcacgtcgtgcgctatctcgcgaacagcgtcgataatctcctgcctcccaccgtaggctacggcgacgttcaggaacctgtccttgtactccttagtggcgcgttcggcctttttgatagctctgcggacacgggtcgggagcagatggagcctcccgacggcacggacggcgacctttcgtcgatggatccgctcgctctccgcgagtgccttgaaccgctcttccatgaggtcgaagagccgcttgagctcctccttcggtcggttcaggttctcggtagacagcgcgtacacagtaacagccttaacacctaagtcgagacaccactccagcacgtcctcgagtttgtcagctccgtaccgatgaccttcccacggttccaatcccagctctcgggcgaaccttctgtttccgtccataatgatgcctacatgctcagggactctgccttccttcaccttctcctcaagtatcctctcgtacatcttatataccggcttaagcgagacgcgaacggcctgccgcagcacgcggcgagagttcaccccggtgacgcgtttcaaaacttcgggtaaccttcctcaccccctcaagggggattcatgatgatcgggatcttgtcggacacccacgacaacctgaaggccatcgaacggcttgctagcgagctgaacgaggcggacgttgaggtcgtactccatgcgggtgactacgtggctcccttcaccctcccggtgctcgcgaaggtggagtgtgacgagtttataggggtttttggaaacaacgacggcgagcgtgactatttgcgcgaaaaggcggaggaagtgggcttcgagctggtcggcgagatcttcacgggcgaggtcttgggtctccgagtggccatgattcacggcaccgaagaggccgtagtcgaggccctcgcccgctgtggcgagtacgatctggtggtttacggccacacccacgaaccggaggagcgcgtggtcggagacacgctcgtggttaatcccggagaggtatgtgggtacgtcaccgggcgccgaacggccgcgctgctcgaccccgatgagaagaaggtagagttcgtcgagttttgacccgacatgcccgatgaagatcacggccttcgcctgagacgtgacgagatccacccgagctgaggggacactcccatcctccgaaagacggagctcgatgacccgcgactcgcgcacgtactccgtgagcgcgtagccgactatccctcactgctggccgccctccgaactccggttcggcgctacacgctccgggttaacactctgaaagcggacctggaggatgtcgtcgaatgtctcgcctcggattttcccgatcgggaggttagagagtctccttactccgagtacgcggtcgagatcgaggtgaaaggaccgtaccccgtggaggggaaccaccacgtcgtagtcgccgacaagttcgcggccgagagcgtctacgtgggggcggatctctacgctcccggggtggtgcaagcggaccccgacatccgtagaggcgaccgcgtgaccgtagtctcggaacgcgggcacccggtcgcatccggtgaggcggcgctccaggggcgtgagatggaaaagcgggaccgaggtactgccgtccgcgtggatcgccccacctttagtgccccaaaagtccgtgagaccgaagcgtaccggcgaggttgggtgtactcccagggtctgccctccatcttggccgtagaggccctgtctccggagcccggcgaaaccgtggtcgacctctgtgcggctccgggtgggaagtgttcccacgtggctcagatcaccggtccggagtccaagatagtagctatcgaccgctccgcaccacgactcgaacggatggaggctcgactacgtcgcctgggtatcgactgggtcgagaccgtgcacggggacgccaggaaggtcgtcaggaggctgcggggaacggcagacgttgtcctcgttgacccgccttgcaccgccttaggtgtcaggccgaaactctgggtcgaggcgacttacgaggaggcgctcgggctaccgtcttaccagtattcgttgctcagagccggatacgaagtccttaaggagggcggaagactcctatactccacgtgcactctcacgcccaccgaaaacgaactcgtggtcgaacgtgcgatacgggagctaaaccttgagcccgagacgccggtgcttcgacccgccagacgctcaggtccgggcgttgtcttcctcccccatcgtgcggatgtccctggattcttctacgcagtactcgttaaggaaggatgagggagtagacgtcgtgtccgacggcgtcgtgaaacgacgggcaataccggcgatggcggcgggtgtagccgttgtcctcatcatgatttggtcgttcgatcctcgtaaggtcctcaccgtaatcgcgagaacggagccgcggctgttcgcgctcgccgtctgtatccaactggttgacttactactgtgggcgctgcgatggcacctggtgttggtacgaggcggggtaaaggcaccgttccgcctggtcttcgcggtcaataacgtctcgatgctcgtgaacaacatcaccccgagcgccaggagcggcggtgagccactccgtgtgtacctactggctcgtatgaccaggtaccgggcgcgtgatatcgcctcctccgtcgttatcgatagggttctcgactactttcccctgacgttactactactgttgagcgccttcctgatcgcgggaagtggaggaagaggcgggattctcgtcatcctactcggtggcgtgtcttttcttacagccgctttgatactgtcgctttggttcttagcgagtgagcgatacgtgcacagggtcgctcgaggggttctccggctcctgtcccgtgtatctcgtcgcgtacgcgcacgccgcctgtgggaggagcttgatgagtgggtggaaaggttcgtgaagcagcttcgagagctcctccaggatcgtctcacgctgattcagggcaccctgttatcggctgcagtgtgggggtgcgagatcctcaggacatacgtcgtgtttttatcgttgggacgcgaggtgcccctacccgttatcgtggtgtcgtttacggtctcgatgttcgcgggtgttctcccgttacttcccggtggactcggactggtggagatatccactgcatcggtttacaggctgtgggggatcgacccgggaaccagcgctgcggttgcactattagaccggctgatctcgtactggatggtgaacgcgatcggtgtgatcagtcttttacgcatctcacggcgagaaagataaggaggtgtgatgtccttgccatacgagctcgggaaagtcgagacgattataaagccggatgacggtggggtgatctccgccgatataaaagtgttggctacagtgagcttgcaccgcggccctacgatcatcgccgaagtcgatcccaggatagccggagagatcgaggaagacgaccacgtcatcgtcgacttacccttgataccttctccgaatgagtccagaccacaacccaggatagtgaagattattaaggatgagaagctcgtgaaccgcgtgaaggcggaaatcgagaaggaacccgagaccatggttccacccgtgattcccgggcagccggccacacctccacccgaggacatgttcggctgatagccgcctggggaggcagatgattgatttttaaaaagagaaaaggtggtaagcgtgaacggcccgagatagatctcaagcttaaacctccggaggaaggtgagggagctccgaagctcaagctccccaagccggaggggaggcccggcgagtcgaaaggcgcagaggccgtccccaaattaaagcttaaacccccgaaacctagtgaaaaacctcctagtggagaagaggaggaaaagaagaaagaagagcgcccaccggctgaaattaagcctcctaagccaccggaagagcgtaccgctccctcgaatttggaagctgaactagagcggctgaaagccgagaataaaaagcttagagaagaattagacgaatggcgcaacaaagccaagagtgcgatgggagagagggatagactaaggtccgaaattaaaagacttaaggaagaacttgagaagcaagagaaggaacttgataagtacatcaaaatttcgaagcaactgaaagaaaagttagaaaaagctaaaagagaatcggaggaacttaaagaaaaagcggaagagtaccgtgaacggtacgaaaagattgctgggaaatacaatgagcttaagtcgaagctggaggatctctcggaccaaaatcgtcgtctcgcagagaatctaaagaaactcaaagagaagtataatgaaattaaggaggagagagataggctaaaggaagaaacgaaagaagtggggaaactcaaggaccagttagctaagcttcaaagtaaacttaaggaggttaaaagcgaaagagacgacctcgccaacgaagtcgaagccctgaggaatgagaacgaaaaacttaggaagaaaatagacaaactgaagtctgagctgagtaatctccagaagaagctcaaagatagggagaagaaattggaaaaggctcgccagcatatcgggaagctcagggaggaaattaagagaagggatgaggagattaggaagcttaggaaggcacaaagtaagttgaaggatgaaattaaaaggtatgaggaagggaagcgacttctggttccacccgagactgaaatggcgatagcaaaggtgaagggtagtattgtaataggaaagaattcaatggttaaggcactccaagaggatgagcccatagtagttaaggaggaaattaatgtcaaagataattcgcgaatttacgggacgattgtggctaaaaacatctcaattgggagtaatgtaaagatttacgggaatgtaatttgtgaaaacaagttggaaatcggagaaggctctacggtaaaaggccatgtaatttctattaattcactgaagacgagtgcggatgtgataatagaagggagtatggtcagcggagacgacatctcgctcgctaacaacgtggaggtcaaggaggttctgatcacgccagggtcggtcaaggccagtcaaggcctcagcgttgcggcggtgctgtgtaatgacttcgaatcagccggttccatagaggcggattatattctagcggatgagagggtcaagctgggtgacgacagcttcgtcaagacggtgatcgttcgagagggaccggtggagcaaggagtgaactcatgcgtctactacggctcgttgtccatcaagggtcggaacccgaagctctacataaacaccgaaccgttcgacgatcccgtcgctaacagggtattccgcaagacgatttccaacgtggagcgcctcgggccgtttcatctagcgaagtcggagaaagacgctaagttcgtgttgaacagggtcaccaagatggacatcgcggagatcgtgaaggaactgcgagaatctctgaaggtctaacccagtagccctcgctcatgtcccacgtaccagtgtagcgacgaccctcggaccgtgcgaacgaacccttcccctctcacctcccatttatcgttggctttccgaacttcgcacagaaccctctccgtgggttcaggacggactgtgattctattgtcttcaggcaggtaacagacgtagtacttctcaccttgccctgaccatatttcgccaccgttcagttccagtttgagtcgcttgccaaccactagagtgtaaacgtcgagacggtctacaatgctgttgccgacaactagactacgctcaggaacgcgcgagtcgctgatgtgagctcccgcacctactacggaccatctcccgatttcacagcgcgagaggcgtgcattcatgcccacgaaacaccgctcctcgattttacacccatggatctctgctccatctccgacgaaagtcaccgggccgagttccgagcgttcgatttcacagtgtgaggacacggaaacccgtttgtgtaacactgagcgacggatcgaagagaagttcgagatcatggcgcctccgtggactgtgacgtgctccagctccacgaacgccgccactcgggcgttgccgcgtattctggattccctcacggacacgaggtgagggtgtttgaaggcggggcacaaccaggcttccgaagagtctcgtaccttgaaccaccggttagtgggtgacctcttcgggtcgactacgacggttagatctaggtagaaaggctttccgacgcgttcctccaggagttcacgggcccgcttgccgatctctcggatggtgctgccctcgcgaccgatgagggtagccttcagcgattccttatggaccacgagttctgctcgggcgtagacgagttcaggacgtccgcggccgggccggatctcctttacctcgattcccacttcccgtgggagtgatccgtggagtacttcgcgtaaggccgagcgcagggctctctcgacggtgcgttcactcggtaggtgcgatgtagtactcgtagttcggtcgtctctgggttcggattgcgggctgctcacagacgtacaccaccagacagtcctgaggtgcctcgacgtaccgaacgttcccactgcgagtcgtcacggcggccagtggatcacctttcctgagccgatctcctacgtcggctatcggtgtgactacgtaaccttcaaccggtatctggtacacccggtccccgggcttcaagaagacgagtgatcgccgatctaccggttctatgacgacgtgtcgggtgaccttggcctccggtacgtcgaagactgacctggcctcctcgtacaccacctgttcgtagaatatcggctcgtctaactcttcggcgatcttctccgctagctcacgcgagcgtacgatcacctcgaactcggggtccgtgagcaagatcttgccgctctctggaacttcgtcggtctccacgtatatcctgggaagtgccaacttcagaactccctctctacaacgaaatccgccaacttttctaggaactcccgatgctcgttctcggggagctcgcgcagcgcagccttagcgcgatcggcgtactctcgggcccgctttttagcgtaatctatcgcaccgagatcttcgagtatctgaataacctcgcgaacgtcctcgcgtgaagcatcctcgttcccgaggaccgaaagtatgcgctcccgctgctcctcatcggcgagctccaggcccttgatcacgatcagcgtcttcttcccctcgacgatgtcgctgcccacgggcttaccgagttcggactcgtctccgacaaggtcgaggacgtcgtcctgtatctggaacgcgatccccaagttctcgccgtactcccgaagcgcttccagttgctcgcggttcgccccggctttaagcccgcctacgacgcacgatgtccgtatgagcgctgccgttttcttccggatcatttcgaggaactcatcctcggtgacttcagtcctgttctcgaacccgatgtccatggcttggccctcacagatctccgtgcaggcgcgggcgagttctttcactgcctctacgtctccgccttccgccgccacttcgaaggctttggagaacagggtgtctcccgccagtatggctaccggtactccccacttcacgtgtaccgccgggactccgcgtcgttcgtcgtcttcgtccatgatgtcgtcgtgaattagagtgaacgtatgaatcagctcgaccgcgaccgcttcagggagtacgtcctcttccgatccacctaacatgagacacgatttgatggcgaggaggggtcggattcgcttacctcccgcttcgattaggtgccaacacgcatcgtagaggtcctctgggcctcctctgggtagtacctcctcaatcttggcgtcgacgagctcgcgtgcacggttcagctctttcagtatctcactccgcatggaatcgtccccttataacggcagacttagcttcgtgccgtcgaacattatgaatacgtctcggttcacctcgtaaccctcctgagtggccagttcggcgtacgcggccagcatatccgggtcaccgtgtgccgggacgatgaactccggctggagcattctgagcattaggcgatggtcttcacgacccgcgtgccctgacacgtgcacgtccttgaacattttcacacccttcagccggagcttggtgtccaacacgtagcggttggctcgatttataggggacggaattgtggacgacgagaacactacgctatcttcttcggtcagtcggtacgggagctcgccgtcaacgatccgcggtaacacggcgcccggctctccctggtgtcccgtgacgatcagtaggtaatcctccttctccttgttcgcccgttcgagtccccgccgaatagtctcggggcgatcgtaaatcctggcacccgcggggaggttcaggagaccgagctcttcggcgatcctcccgtatttgcccatggatcttccggcgaggatcactttcctgcctaatctgtccgcagtgtctgcgatcgcctgtatccgttctatgtgtgacgagaacgttgtaacgataatcccctcactttcctcgtcggcgaatctgagcacgtcgtttaccatttccctagctacagattcggaaggtgtcttaatttcttcagcgaccctcaaactctcagtaatgagcagtaacacaccttctttgcccagctgtttgagccttttataatccggtttgtatcctattatttgattatcatcgaacttaaaatcgcacgcatatactattgctccgtagggagtatgcaacactggtaggacacagcacggtatgctgtggcttatagggataaattcaagtcggagtttcgaggagatctgcacttcgtctccaggctcgactgtgtacaagttaatcatgatatcttcggcttcatctgcgtaccttatctcattcctgaggtcggctttcacgagttctattgtgaactcagttccgaataccgggcacttgtacttaaagagcagcttaggtaccgctccgatgtggtctaagtgagcgtgggacaggaccgcggcgaccgtcttggaacgatgggggcgtaagatagggtcgttcggtatcgctttcactctacggagttccctggctgaggctttctgaaaatctttttcgaaaactagtgatttgtccagggacataccacagtcgaagatcactatctcctcgtccacgcggaccgcggtcatgtttcgtccaccggcctcgccgtatccccctactgcgaacacctcgacggtcaacggttccaccccgttcggcgatcaccggtgcagacgagatcgagtgggactccccggcactccaaccactcacgcagcttcccgtacactactatggggacgctgctcatttcctccacggacgaacaccccgccatcaacatcgcgatcttgacctcgcgagcgatcgacttcaggaagcggacgcagcctctgacgccctcggccagcactttacggagcactggtaaggccattccggcgcagtccgcacctagagccagaaccttcgcgacgtccattcccgtgcgcacgcctccggttccaattatcgcgagatcgttaccgacgacgcttctgacttcgagtattgaagccgctgtggggactccccaatcggagaacgcgtagccgagtggtatctcaccgtgggccttcgaccggacggcttcgaccaccgcccagttggttccaccggctccaccgacgtcgataccgtccacgatatcccggaccaacttggcgtcttcggctgacacgccggctccggtctccttcaagaccaccggcacgtccaccgtttcgcagacttcggcgagtacgtccacgaacccggcggcgtccgcctcaccttccaactgaaccgcttcctgcagcacgttcacgtgaacggccagcgcgtctgcgtccaccatatcgacgacttcgagcgcgaggtctgggccgttctcgcgcagctgcgggagcccgatgttggccagcaccaggccgtcggggtactcctcccgtaccacctcgaacgtccaccgcacctccggatccttcacgccggctcgctggcttccgacccctatacctatctcaagctcgcgggctactcgggcgagcttccggttgatctcgccggttttaggatggcctcccgtcattccggcgattatcagcgggaaggagagccgcttcccgaagagttcgatttccatgtccacgtcgtcgaagtcgagctccgggagcgcccgatgtactatcttcacgcagtcgaacagcgggctttcctccgattcgacgtcctcccaaatacacgctagcacgtgttcccacttccgttctctcatcccttcagcgcgtgatcctcgtaccaacgtgctcaccccgaaggaatcggtcgacgttttccggatcccgagcatcgaacatgtacacttccgcgccgcgctccgctatgcgtgcggcccttcgcagtttctccgcgatgccccccgtcacatctacgccggcagaaccctccagctgccgtgccaagtctcgcgcttcatccggagagagctcccttaagggctccccctcctccggtgttctcgggtaaactccgtcgacgctcatcccgaaaccgacccggtccgggcccagccaggagacccgctcggcgatttcgtcgcccgacatgatcctaaacccgtccccgtcgtggtccgggacgacgtcaccgtagagtaggggaacgcaaccacgttccaacaggtccactaacacgttgagcgagtacagtaccgtcgcgggtgtcaccgggtacacgcgcactcccgagtccactgccaccttctcgacgatagaaagtagctcgtgcatcgcccgtcgaacctccgaaacacccttttgcaggtcgcttactctcgacgccgcgtagtgcccgaacgacccgccgccgtggatgagtactaaatctcccctccagtctgagatgactttcataagtcttcgaatacggtcttccctggccgttttcggtttcgatttgtcggtgatcacactccctccgagcttcagaaccgtgaacacaggagccctcgacgggacctcgacccgcccgtaaaacggccttcgggggcgatgaggacacccgaggcctcggggaacgatgaccggagcggtgggcggccgagcttgtagggggtagttccatgaagccggtgaccttgattaggccctcaggtgaggtgacggctaagagcgcgcccgtccgaaagacgttactgggtgaactggcgcggcggttagagcggaggctcggcgaggtggtccgggtacgcgggccgaggctaatagtcccgggccaccatccgaacgccgcttcggagttcggtgtcgaaggtgcgctaccgggatacaaggtgagaccgaaaccggccacaatactcaaagccacgcgacgcgcgttgcgggagtgcccagaggagatcagggtggacgtccggtcacaccacgacggcgtttcgggacatgcgctgttcgagtccgtgagggagatcgtcgagtctaccggccgtaagactagcaagcgtgggtcccgactgctggtggaggtctatcccgacgtcgcttacgtctgcggacccgagaaagccggtcccggtggtcttcctgtgggcacgcaggggcgtgcgctgtgcttactttctggaggcttcgacagtcccgtggccacgtggatggttatgcgtagaggactcgagtgcaaagggttgcactttttagtcacggagtcggagcttgaagcggcccgtgagaacgagcgagtcctccgacgctggtgcccggacttcgatctcctagtggacgagtcgcaccgtgagttcctggagaccgccgaggagcgactgaccggacgactcaaacgatacctgtgcgttgtttgcaagatgaggatgctcgagcgtgcctctcaatgggccgatcggctcgggtgtgattgtattgtcaccggtgactcattgggtcaagtggcgagtcaaaccgtatggaacctcaagctggaggagtctcaagtgaatggtatcgtactacgtccgttggtcggtctgaacaaacccgagatagtccgatacggacgtaggataggggtccctgaacgcgatccgggacgatgtccgttcgttccggagagacttatcgttaaacccaggaaacgggaggcgttgcgcgcgtatcgggaggtgattaagggatgatcattaactccgtcggtagaaaggtgctctaacgtctgagaatttgaggggtggtgtccataggctttgagagaagaagtcgcgtccagccctcaagggctcggactcgagatattggctaaacacaaagtgtctgacttcgttcgtcacggtgccattgcggtgaaacccgatgaaccgctatggaacgcgttgaaggctatggtcactcacggcattcacggtgcggcggtgatggaggactccaaaatagtcggagcgttcgaggaggatgatttgctccgtgccctccgtgcgctcgaggaggacgctctcgcggccgaagttaagcggttcatgaaaccggccgtggtggtgaagtcgagcgatactttccaaaacgccatggttgaaatgctgaaaggcaacacgacccgggcattcgtacgttcttccggtctcctaaggagcggcgtgtacggtgtgatctccgcttctgatattgtacgagtacttacgggggattacagggggttcagggctcccggcaacacggatcgaccggtttcgcctccgaaagtcggtgacatattctggcccggaagtgtagccatcaagcaagtgattcggaactctcctttgaccctggacgcttccagctccgttgccgatgtcgcgaggtgtataagcgagaagggtcgacactacgcggtcctcctggagggggagtccccgatcggccgcgccggtgacaaggacgtgatgggtgccgctctcgacgcgattctaaaccgaagagatttacacgacctcacggccagaaattatctgcaagaaatggtggtggtgcctcccgagacgcctctacatgaggctctttgggaagttatcgacaaaatgtcagatagaatatacgtgatggatggcaggaagttaaccggggtcgtgccattaatagatgccgtctacacactggcgaaagtagctagtgattgacttctgacaaggtatacaatcgctctggcgatcatcgggggtggggcttttggtcgacctggactgctgcgtagtgtgtggtgacagtccggaaagtatcgtcgatgaagtcgtcgaaaggcttggtgaccgtgccgatttcggaatcgtgttttttcacgatatagatcccgaggacgtagtctccgagctcagttatggagttgagcgtttcgtcggctgtgtggctggagagggtcactatccggggtcggttaaggggcataagatcagcttactggcgttgaagacggaatggatggccaagttcggtaccggcggatcggcgcgtcaagatcctggcgaggcttctcgtggtgcactggaggaggctttcgaggacctggatttcgatccctacgacgtctcctactcagcgctcaatcttaaagatccaaaacgtatcgtcatgtacaggccggttatcggcataacgttcattgagggggccacgtttcacaacctcggtggtacgggtctcgaagtgctctccggcttcagattcgggagtggtcctgcggccgaaagtatccgcaccttcggagcgctgtccagcgatcctgagttggagagtgctccggtggtgtgcgataaaggggtgttcgaaagcggtgctgtttacgctactatttccacgttcttgaaggtcagttggtcgttcgcatcctcactgaaacccgtgacgaagctcggaacggtaacgaaaagtagggagaacgtgatcgttgagatcgacgggcgtcccgccggcgaggtttacatcgagaaactcgaagaggtgaccgactacgtcaaggcatgcccgaacgagtacgtctacaaggagcttccaccgctcggtgtggttcgtgtgttcccctccgtcggacacaggatcatcccacgcaccccgctagaggttaccgacgactacatccgaacggcgggttacgtcgtggagggcgagcagctgctgcttctcggcttcgatgataggccgaacgctcccgttagggcctaccagggatccttgagctcaggtgaggagccgctagcatccattctggtcacgttcgcgggacgcaagccgctcaaggaggagatccccgacaagcattgcgtggggatgtactccttcggagagatcatcccgattaccgggtataacgagtttcacaaccacgtatccgcgtgcctgacgatcttcagagagccggtgttcgactgatcggtcgacaaaggtgataactcgccggtcacgggggcggcccggggcgtccgcttgagagacgttatccggggaagggcctgggtcttcggggacgatatcgacaccgaccagatcatcccgggtcgatacctcactacccaggaccccgaggagctggccaagcacgtgatggaaggggccgatccggagttccccgagaaggtccgcgagggcgacgtgatcgtggccgggaagaacttcggctgcggttcctcccgtgagcacgcgccgatcgcgctcaaagctgccggaatcgcctgcgtggtcacgaggtccttcgcccgtatcttctaccggaacgcgatcaacctggggttacccctagtggtttgccccggcgtggacgacgcgttcgaggatggccaggggatcgaggtgaatctccgagaggggtatgtcaggaacctcgacaccggtgaggagctggaggcgaaaccactcccggacttcatgatgaggatactcgaggccggcggcctggtggaattgatcaagcgggaagggccacgggctttcgaggggtgacctccgtggcgtacaagatcgctgtgatcccgggagacggcatcggaccggaagtcatcgaggcagccctccacgtgatcgagccgctgatcgacgcggagttcgtcgagggtgaggccggcgacgaatgcgctgagaagcacggcgatccgctgccggaggataccttggagctatgccacgaagccgatgcgatcctattcggggccgcgggtgagacggcggccgacgtgatcgtccggctgagacaggagctcgacctgtacgcgaacatcagaccggtacgtgggtttccgggactccgtgagctcaccggtgagccgtacgtgcgggacgacgtggacttcgtgatagtgcgcgagaataccgaggggctgtactcagggatcgaggggagattccgagacaccgcgtacaccttgaggatcatcacagaagaagggacgcggcgtatcgccgaagtagcttgcgatttagcggaggagcgcggttcgaataccgttacgtgtgtgcacaaggcgaacgtcatgcgtgagacgtgtgggctcttccgcgaagtgtgcaaggaggtggtcgaatcccgtggactggagttcgaggagtactacgtggacgctgcggctatgttcatgattaccgagccggagcgcttcgacgtcgtcgtgacaccgaacatgttcggcgacatactatctgacgaggcggcagcactcgttggtgggctggggttggcgcccagcgggaacgtcggcgaccgccatgggctgttcgaaccggtgcacggatcggcgccggacatcgcgggtaaaggaatcgcgaacccgttcgcgacgatcctttccgcggtcatgatgctagagtggttgggtgaggacgaagccgcggaagccgtaagagaggccgtgggtgaggcgatccgagaaggtgtcgtcacgccggatctaggaggtgataaaaagacgatggaggtggcggagttcgtcagggaagctgccctcaaccgggtccagtagtgggtccagtggtggacgatccagtagtggattcttccttccccgcaccctgctcctctccggatcggcctcccacgtccttaactttcgtcttggcggcgatctccgacggcgacagtgggtgaggtttacggttcttgagctccggcggtagtaccaccttagacatcttctcctgttcctcgatctcctgtttgataggcgagatactgacgaaccccgcggccataccgatgacgaaccctagaatcgcggaagccttcaggacggtttcggtcttcaagtccgtcaaccccggagggaaatgtcatgatgtcgatcaaaatgacgatcggagccaccggagccgctgaggcggcttcgcacggggacgtgatcgtggtagtggacgtcgtgaacacttcctctgcggctgaggtcgccttacgcgaaggggctgtcgccgtagtaggggcggctcccgatagtgcttatcgggtcctctcgggtgagcacgcggctaaatacccgttcgcggagacacccgaaggcgttgacccggtagagcgaggccgggaagctggtaagatagccgtggaagagggctgcgatgtagtactcgtggtagacggcggcgaagataacgcgagtttggctaggaaaggcgttgaggacgtcggggcggaaatccgggaggtcgtacctaacgcgggccctaggattaaggacgtggtggatccggcgggtaaggtcttcttgttcgccacggctacgggcggaacgctctacgatgtcgctaagactcacggggctccggcggtaacgttcggaaccgtcgtgcgtcgctctttcaccagggcgtgtgtggagagagcactgaggttagccggcaggtatggggcgggcgtcacgatagtggtttcatcgatcttcgccccggaagacttagacgccggcgcgaggattttcgaggaggcctgtaaggtcatcacggaaagcgtctgtgaagaacggttcgaggacgtcgtttcgagactgtaggggaggcttcggttgggacggtacgtggataggtacccggacgagaacgggtatttcggtgagtacggagggcgtttcgtgccggagacgctcatgcccgcgctggaggaactagaggatgcgttcaaagaagcacgtgaagacccagagttctgggaagaactcgaagaactgtggcggaagtacgccgggcgcccgactccactgtactacgcacggaacctgtcgcggaaactcggcgtcaaggtgtacctcaagcgcgaggacttggtccacggcggggcacacaagctgaacaacacactcggtcaggccctgctcgccgatcgtatgggtaaagatcgcatcatcgcggagaccggtgccggacaacacggactcgccaccgccatggccggggccgcactgggcaagaaagtcgagatctacatgggggccatcgacgtagagcgccagaaacacaacgtcttcaggatggagctgatgggggccaaagtccaccccgtgaaagccggaacgcagacgctcaaggacgcgatcaacgaggcgctgcgcgactggataacgaacctcgagactactcattacctcttgggttccgtcgtcgggccgcacccttacccgtggatcgtccgcgagtttcagcgggtgatcggcagggagacgaaggagcagatcacggagctagagggaggtcttccggacgcgatcgtggcgtgtacggggggaggcagtaactccatcgggatattctacgacttcctggacgatgaggaagtagcgctatacgccgtcgaggccggtggcaaggggctggatactgacgaacattcggcctcgctgtgcgccggggaggtgggggtcctccacggttgtcggaccaaagtccttcaggatgagcacggccagatccgaccgacacacagcatcgcacctggtctcgactatcctggagtgggtccggagctcgcgttcctagtggacgaaggtagagtcaccgccgacgccgtgacggacgaggaagcactgcgtggtttcgtcatgctgaacgaaaccgaagggatactcccagcgctcgaatccgcacacgcggtctattacgtgaaaaagctggtggaaagaggtgaactggaccgtggggacgttgtcgtcgtgaacctgtcggggagaggcgacaaggacgtaaggatagcggcggaggaattgggggtggagatctagctactccttcggtactatacggaacttacagatatcgtcgcccgccagctggcacttcgtctcctctatctccatgctcttatcgtacttcagctccgctagcttgcggaataaggcctgctccaactcacaagcgggctcggtgaatcccatttcctccttaacctcggggttctcctcgtagaattccaccgtaaccgtcgtttctacggtgatgactatttcttccgggtcctccttatcacccacgaagtcaacctttatcccctccatgcccatatcctcgagcaactccagcatctcttcgagggagtccgcgcgctcgtagacgatttccgcgaggagctctcccttctctcccgctccctcctcaaggtcttttatcagctcatccaagggggagaccccgacttgaagtatttcaagaggttgtccgatcgggagcgcgcgatattcgaggctggaatcacgctgggcgctatatatcatcagttctgcggcacgcctgtatcacccggcaccgcggaggaggtggccaagtgtatcgaacgtgctgccctacttcagccctgcgtaatcgatgctcgggtggaggtggacgtatcatccgaggataccgacaactacggtgggtacacggaggtttcaggccggaacctacgagttacgattgtaactaggtgcggggagtgggaggccgtagggaagctcgagttcatcgaggagctgaactacccacttatgtgggttgaggagatccggcgggtggaacagtgaccgttatcgggatagccgccgacttcgatccaccccaccggggacacgcttacctattagaccgtgcccgagacctcggtgacgaagtcgtggtgttcctcaacgctgattacaccgcgcaccataccccacctctcctaccgtaccgcttacgtcgcgagatagtgttagagctcggcgcagacgaggtgataccagtccgggggtaccaccagcgatttccacttgcctacacggtccccgtgcgagtcagactcatggcggaggagggcgtggatgttatcctcgacgctggaccgtcgcgaaacctcgatcggctccgtgagcacgtcgagagggtgttggaggtaagtgacctcttctccattcctccgaacgttccggcccgtaatgtggtccgatggttggcggccgtcgagtacgtgaaccgagagctgggaacggacgtcgagctactccttattccggagctcgaagggtattccggtcgcaagatcagagccgcgctccggcgctccggctattcacccgattcgctcagaaaagtcaggcgtcacttgccccgggaaacgttcaaaaaacttgaacgatacctcaaggcgcggacaccaccgatagcccggcgaaaggagctcctcgacgtcttgaaccgcgcgtcgagctacgagctctgtagcatcgcacacctcaacaccatcgccgttcgggagatcctcagagggcgtccattcagatcggagcgtcaggtttggggggcactccgcagagccgactacggttcggtgctcacgcggctcgcattggcgaacaccgagtgtcgcgtaacctcggacgagatcgctcggatcgctctaagctggtgtgtcgagcgtcttgtcccggagaaccaatctcccgactcgatgtaccggcgcgattggttcgtggcggctctttccagccatggggttaaggcccgcgatgcggatcgactgtacaagcgagccgattcctacgaagaggctcgtcgactggctcgtagacgttacggcgtcgatcccggagtcccgcggttcgagaccctcataggtgaagctagggtttcggacggagaatatcgtccggctatatcggccaacggccgactgggggttgtcgaggacgggtttcaggaactgcgcgcgacggcattcggagccacgttgctcaggtacgtcctggacgaccccttcgtggacgccgtgattcgggtggaagacgaggaggccagactgatcgttttcccgggggactcgccgtgaggaggatttggttccacttggactcaaagaataggtacagcctggcacacgtgctcggggccgtagaggcccgtgcccccgagctaataccgtacatcgaggtctccaggaacccggatccggagcccggggacatcgtggtgttctcgttcaacacgttcatggctcccgaggtcttcgaggtggtggaacgtctccatgatgacgtggtgaaactggcgggtggtccccacccatcggcccgaccggaccagtgcctcgagcacgggttcgacatcgtcctgatcggggagggggaggaagtagtcccggaggtactccgtgaactcattcgtggtaaggaacctgaagaacgccccggcgtttacttgggtgaggggaatcctcaaccagccccgcgggtggaggatctcgaccgctttccgccgtactccgagggttttcgcatattctgttccgtcgaaatcacccgaggatgcccttggggttgtgccttctgtcaagtcaccagactcttcgggccgaagctgcggcatcggtccgtggaggacgtggtccgatgggtcaggagaggggtcgagcggtacggtcacaccttcgctcgcttcgtcgctccggatgctctggcatacgggtcacccgacggtatccggctgaagccggaccgagtgaagcgtctcctccgatcactccgctcgattgaggggttagaaaaggtgtttttcggtagctttccggcggaactcagacccgactccatcgccaaaggggatgccattgaactgatcgctcactatgcggacaacgagcgtgtcaacatcggagcacagtccgggagcgaacgcgtactcaagaggattgagcgagggcataccgtggaggacgtcgaagtggccgtagagaaggcgctggaagtaggtctgaaacctgtggtcgatttcatcttcgggttgcccggggagacggaggaggaccagttagcgtcagtagaactcgcccggtggataatcaagcggggtggtgaggtcagactccactacttcatgccactgcccggaacaccgctggagaacgaggagccagcaccgctctcgtccaagatccggcgtatactcggacggtggactcaagaaggtaaggcggaaggcgcgtggggacaccagatgaggctctccaagaccgcgatgaaagtcctgagcgggtaatggaattggaggtcctcgtgctaagcccggccgcattgtacagacgtactgtgaaagcacttcgagatctgaccggcttcgcccgggaggtggtgggactcgaggagttcggtgtaggtatagtagaaaacccgcgtgaatacgttcggtggttagccaaacgagttgatgaggggacggctgaggacgctcttctcacgctggtcggagggtcgggagcgctcgtcgtacgcgttggcggtgatacgtatcacgtgctgataggtcccgcttaccggtctgaggaatccgtgaaagccgcactggcgcacgagctggcccacctactgcagcatcgattgaagctgttccccaaggatgtacccagaccggcaggagctgtcaggtccgtgctgctaccactcgaagtgggtgccgaagagctcgtgctcagagagctcccggaaataggtgaggtgaggatcaggatggcccaggaggaggcgcgggagtggcgtcggacgggcgacccgatactggacctcgagaacgcgctcgtcgccgtcccgataaggctagccgctcgacgtctcggactcgacacctccgtgcaggaaccctcgatcgaggatccggagctgagggaggtgaaagaagagctggtgaaactggcccgaggtgtcgacccgtgggaccagtcggacgtggaacgttatacccgcaagtccgtgtcgatactcctggattggctgctggatcaggatcggcaccactcgacgagcgactcgaacaaccgtaaaccgtcatcggagttcaggagacggtgagccgcgcgctcagggtgaggcatcattccgaggacgttcccatcgtcgttcacaactcccgtaataccgccgacggagccgttgaggttgtactcctctgagacgtcgccgtcgggtccgcagaacctgaacaccacgttgtcctcgatctcctccgggttttcgtagtagtaccgtccctccgcgtgggcgatcggaactcgaatgacttcgtcctcctggtacttggtcgtgaacggggtgtcagtacgttccacgcgtaagtagacccaatcgcagatgaacctgttcccgacgttgaccgtgagagtacccgggatgagctccgcttcggctagtatctgcattccgttacacactcccagcacggggcgcccgtcctctgcacactctcgaatctcctccaaaatcggggatagcgcggcgatggcgcccgcccggatgtaatccccgtaagtgaatccgcccgggatgatcacggcgtcgaagtcgtctaacccaccatcttcgtgccagacgaactccggatctccaccagcgagcttcacggcccatgccatctcgaggtcgcagttcgtgccgggaaacctgatgacagccacacggaccaaactcaggcccccgatgatgacctaccccgggaccgaggtgatggggagtcccaagtacgccgagggggttcactcgacgacctcgatctcgtagtcttcgacgactggatttgcaagaagtctccgacacatctcatcgacgagctctacggcctcttcttcgtcgttgatgtcgagctcgatcctgtagatcttggccgtccgaacgtcttccacctcctcgtatcccagtcggtgtaacgccctcttcacagtctcaccttcggggtccaatgccttcggtttcaagctcacgcgaacctcgacggtgaccaactgtgtcaccccggtagcatggccagcttctcctcatcacctcgcaggattctctcggcggcttccctgtaacccgccagaacgtctccttcgtcttttctgaagatgtccttgtccaggctctcttcggtctccgcgtcccagaaccggcacgtgtcggggctgatctcgtctcccactacgacttctccgtccgggttcactccgaactcgagcttgaagtccaccaggatgatgtcgcaatccttcaggaactcggagagcacttcgttcacctgcagggtcagctcccgcatgcgttctacttcttcttccgtagccaaacctagcgctcggatgtggtccatattcaccatcgggtctccgtattcgtcgctcttgtagtcgaattcgacgatcggtggatccagcttctcaccctcctcgaatggtagtcgctccaccaaactgcccgtcgccatgttgcgacagatgacctccaaattaaacatgtctaagcgctccactaccatgcgacgctcgtcggcgagttccacgtagtgggtgggtattccggcgtcttcgagtacttcgaacaatcgcgccgaaatcaggcagttgtaaactcccttgccttcgacggtatccattttctccatgttaaacgccgtgatgtcgtctcggaattccatcacgagcaggttctcatcctccggatgttcgtagagactcttcgccttgccctcgtagacgagtctaccgcgctccatagcggtgcccgctcccttagccggccgaacctgtatataaacactaaacgcgtcaacaaacggagtggaaagttaacttatgccgttcttgctggagggggcacgtcagttgaagactatagaggtcggtgtggcttacgggaaggatccgcacgcggtcgtggaggacgcgatagatcagctaacggaggatcccaacttagggctggtattcttctcacccaagcacatcgaggaaatcgagagtgccgtgggcagcctcccagaaggatgcaaggtgatagggtgttcgacggccggtgagctcactccggatgggtacacctatggcacagttatcgtggcgttaatctccagcccgtacctcgccgtggaaacgcaccgcattaccttcgagcgtgaagacccgaagcacgctagggagataggccgcaacctcgtgctcggagcgatggagaagctacgtaacccgggcccctgtctcgacatcaacttcaacgccatgctcacgagtctcagtgagggaagacccatcagggcgcttccctacttcataatcgagctcgtcgagggcctggttcccgccattgattactacatggacggtatcaacgaggtggtccagaagtacaagttcctcgaggtgtacggtggggcggccggtgacgacctacgtctcgagcgtacgtacgtgctcgaggggcgtaccttgtgtcctgaagggtcggccgtggtagcgttcggctctacggctctcaagatcggcggggccctagagtgcggattcgagccggtgtatgaggataggttcccggtcaccaaggccgtacccgaggagcgacggatcgtggagttcgacggcgaaccggccgccgattattacgccgatgtggtggggaaacccgtcgaggaactcgatgactccgtgttcatgtggaacccgcttggatgggagatcttcggccgggagatcatcgtgcgcgagccggcgttcgtggaagacgacgggtcgatgatcttccattcgaggtcaccggcggcgggagcgttgatccggcttgaaccgactgaggagaacatgcgtgaaaccgcgcggcgtgtcacggagcgggcgatgaggagggcggacatccgagatcccgaggagatcgcgctggtgctcgtgttcgactgtgctcaccgggactgtgacgcccaatacgatgccattcgggaagtggtgggcgacgatgtgccgatcgttgggttcaaaacctacggagagcacgggcagcttgagtcgggccccgtcggtcacttcaaccagaccatcgaggtcgtcgatcggtagaatcccggtctctcgctgacttccacctccgtcgtcatcgtttcgcgtgagataacgaagggggtctccgagatccgagtagggctcgtgatccacggtcctacggtgatcgacacgggttgggccgagcgtatccttcgctccctgaaaaggctgggcgaggtccgtgctaagctcggaggcaccaccggttacgtggcgctcttagacgcgggactagactccgtggtggagttcgaccggaagctaccgagcgagtgcttgtccgagctgaacgagtgggccgacgttctagtcctcacgaaccacggtaaaagccgagaaagcggtctcgctttcgcggaacaggtactctccagggccgaaggtgtcgactcgctagtacaggcagagcgcccgggcgaacccgacggtggtatcgtcctgtggaaccccggcgacgcggagcggacggtggctgagcacctccgggaggatttggggttgaagattaccgaggttcggactgttcggaccgagaaaggcggcggaattgggaagtcccggagggtcgcctgtgtcgagccgggtgatcgcattctagtgaacggaatcacggtaggtgtcgccgaatcccggaacgtggagctggtgttcgatgacagcgggtacttggtggagattcgcggcggcaggatcaagccggaaggtgtagagcgcctcggccgggtggatcctgagcgcgtggtggtgaaaacggaccgcagacttaggagaactgagccggagcgtaagagggtgaagagtgggcccgaaaggatccatcgggttctactcgtcgaccacgacgcggagcgtaaagtcgaagatatgcgtcgatcggacgctgtcgtctccgtcggggacgacacaacttgcgtgtgcgcggagctaggtgatcggctgggagtttgggtgatagggctcgtcgatctcgatccggacggatgggttcgtgacgatacgcgcgagtccctgcgcagctccgagaacctagcggccctactagtgtgtgagcgggacgacgatgccgggaaattggttcgagggcggttctttcgcgaccgagagatgagggtgctcgatccccccgtgacagttggggagctcgtcgaagaggtgaaagagtgcgtaaaggaggttctcaagtgcgtgtaccacaaggcgaaagagacctcagcgtgagctgggttcctcaccactcggacccgcgacttctcgtcatcggtgggggttcggctttgaacctccgggaactcgcccgcgagctccggtcctttgagggtgttaccaggaagcatcccgtgaaaaccgtggtggagggtcttttagagccgctcgatgtgacgttcgaaggagaggtcatcgcggacgtgggcgaggatgccgcggcggtaaaggtgggggacgacatactactgatcgcggcagacggcatctggggcaaactgatcgatcgggacccatggtgggctgggtactgtgcggttctcgtgaacgtgaacgacgtgctggcgatgggcggccggccagtcggcctcgttaacgtgctttcgacgtccgacgtcgatgtgtgtcgtgaaatcctcgaaggaatgcgtgagggcgcgtggaagttttccacgccggtcctcggaggacacacacatccggacactccttacaccgcagtagatgcggcgatagtgggggtcaccgacgaagagcatctcgtgctcagttctactgctgaggagggggacttgatagtcttcgtcatcgacctcaacggtcgaccttatccggagtatcctcttaactgggatacaacaacgatgaaggatcctgactacctcaggaggcaaatggaagccgtagtggaagcttctaagctcgtgaaagctggtaaagatgtgagtaacccgggcctcgtcggaactctcgccatgatgctcgaagccagtggttgtctcggtgctgaggtgtggttagacagcatcccaaagcctgaagacgtagacatggtcacgtggctgaaaatgtatcctggaatgggtttcgtgtacgcggtggacagtgagcgcgatgtccgtgcgatcaggcgcgtgttgtccgatgccaggctggaagtgtcggtgatcggcgaggtgacggaggacggtgttgttaaggtgtccgaaggtgacgaaagtgctcgagtgttcgactttcgagaggacagaatcctcggggtgtctccacgttgagagtatacgtcgacggggagcctgttgacgtacccgaggaggcgactgttcgcgatgcgctcgaggcagcgggagtcagtgtgcccgaagacgtcacgatcgccgtattcaaaggtgaacagaaggtcgagcgcgagaccgataggcttcggataatgctcgagacaggcgacgaagaactttcgctaacggtggccgtcgaagacgagcgaatgagtgaggtttgtgaggaattgcccggagcctccgtctcctggacgacccgtgacgaggtgggattgggtccggtggacgtttctgatctcgagttccacacacgtcggggtgtcgaagtccctccgtacacggcgatcctgatcctgcccaccaacgatccctccgaggcctacttcctgatcaccaagcgccggatggccgtcgagtacatctgtaccgacattcatggccgtgtaacggctggtcgggagctggtcgacgagctccgtggtggagagcgcgtgacacacgtggagcccgtggttgagcgcgccaccgaacgtgtcgtctcaagggtcacccttgacgacggactcgaggccggtgaccggatcattaccagggtggagatagaactcgagaagaacgcgccggtcagtgccgagcacctgctcaacacgctggagatggaagagggtcggttgcggattaagttcaggacggacacgttcacatcgatcgagccacgtccgttctacgatttgcccgaggagaacgtcgacatgcgtgaacgtggcgtcgtgaccgtacgcaatcgaggcgtcgacgaaggcgtcgtatacgtgtaccgccgtgaccggactcccgtcgagagccacaacgtcgtaggtagggttcgccgggggatggagctcctcgacgtggtggccgagggcgatcgagtcctggtggaaaccgatcctccccgggtgaacttcgtcgggctgaccgtcgacgaagccagggagctggcggaagagttcgacgtcgagctcgaagtgaacggtgatggcgacgttgtggtcgatcaggagcctagggagactctgaacgtactcaaggagaggaaagtccgggtcgaagtagttcctgaggacgaagttatcgaaatagagctctacgaggacgacgctccgcgctccgtcgagtacttcaggcgagtcacgaagatgttggacagaccggtaggccgtctcaaagttcacttcgcttacgcagacttgggaatgatcgtgttcgaagggaacgagaagctcggaaagaagcttccacccgagaacaacccgaaggatcgagttgaggccggtgtcctgggggtcacgaatcaagccaaacctcacgcgggtctcatcggagttcggctcgaggacagcgaggaatacggtcctacgggcgagaccttcgaaggtacgaacgtcatcggccgcgttgtggaaggactcggccgcctccgcgagatggaccagtccgacatgggtcgtaccgtctacgttcgggaggtgaggggcgagcgatgaaggtcctggtcatctccccagagtattacacctacggagccatagtagtcgcgggagtttgcgaggaacacggtcatagcactatcctccgacgttcacccgatccggaggccctcaagcgggcggacgtgctgatactatccctccacaccaccctacacctcctcgatgaggatatcctcgagatagctcgccaggcccacgagttcggtaaacctgtgatcgtcggcggaccagtttctcaagttccggagctcgttttagagaggtttcccaacgcgatcgtggctaaaggtgaggcggagacggggcttcctccgctcctccagaccttggaggacgaaggagacttcgaagacgtcgagggaatcgcgctcctgagggacggtgaaatcgtcgacaccggctggcctccacccgccgatctagatggacccagcccactcaaggttccgcgcgacctcggtcggcaagacgtccgcggagcgaacgtgtacatagagacgcatcgcggctgcccgggtgcgtgtaccttctgccaggttccggagttcttcggacgccgtgtccgctggaagcccgtagaggcggttctcgaggaagtcagggagcttacgcgaggtggtgcccgtcgcttcgcgatctccggggggaccgtcacgacctacggcgacgacgaggaagatttcgtcgagctcctcaaacgcctcgcggacctcctcggtcgcgagaacgtttccgctcccgacgttcgtgccgatctcctgaacgagcgcctcctcgaggctatccgcgattacacgatcggttggatcttcctcgggatcgagagcggtagtgataggatcctccgtgccatgcgcaagggcatcaccgtcgacgacgtctgcgaagccgtcgaactggcccggacagtcggcgtccgtgtcgccggctcgttcatcgtcggttatccgggcgagaccgaggacgatcttgaagctaccgaggagttactcaccgagctgaacctcgacgacgtgttcatcaacctcgccgagcccatccccggtaccgagctcggccgcctcgttaccgagcttcccgaggaggagattcccgtcctccggccgggcgagcagctcgagaccgaggctggcgaccgcgccctccagcttcagctcacagccttcacgacccttagtcgcccagttcctctcacggacgacgtgtttcacgaggccctccacaacattcgcgaggacgagcgcaaggttctccggataacccggttcctacgcggtgcccaggggtgtaccggatgaggatcgcgatactcggcggtaccggcgccatgggccgtcttatcgcccgcgagctccgtgacgacggtcatgaggtagttatcactggttctaaccctcacaccgccgaacgcgtcgcccgcgagctcgacgtcgaggctgctccgaccaacgtcgatgccgccaaagatgccgacgttgtggtggtttccgtccccatctccgtgactgaagacgtcatccgtgaggtcgcaccacacgttcctgagggttccctcctcaccgacgtgacctccgtcaaggttcgtcccgttcgcgctatgctcgagcacgctcccgaggatgtgtacgtcctcggaactcaccccctcttcggccccacggtccccagtctccgcggtcagaccgtcatcctcacgcccacggagcgtagtggtccctggactcgccgcgttcgtcgttatctcgagcggaaaggcgctcgagtcgttgagaccaccccggaggaacacgatcgcactatggccgtcgttcagtgcctcacccatgctgtcctcctcgctgcaggcgccgccataggccgtttcctcccaagtctcgagctcgacatcgaagaggtcgccagccccgtgtatcgcctactcatggacgtcgtgggtcgtatcgccgggcaggatccacgtctttacgccgagatccaagccttcaacccctacggtgacgaagcccgtgaagagctcctccgcgccctcagacgcttccacgagcacgcccacgaccataacgcccttaccgagtacatagcggagagccgggagagactcggccgagagctcgatctcgaagcctgtcagcgtcgtaccgacaaactcctgtcgtacctggccgacgaactcaggatcctacaggagggaatcgaggccatcctcctcgacgtgtacacgaacgaggcccttgagggtgaggttacgggtgatcgggatacaatccgattagacggccgtgaactaccccgagaccgttacaagatcctcccaaggtgtcccaaagagcttgcacacttcgacggtgaagttacagttctagagttgcgtacaggtgcggatcccggggacgtcgcggccgtagtggacgctctcggccgtaacttgcgtgcactacgggccgagcgtcggggcgaacgtgtacgcgttgaagtcgaatacaccggcaaggaatcgctcgagggattactccgaaagctacgcgccctgggactggaagtgcgggttgctcgatgataggcacacgtcggactccgggtttcaactggactttaaaaaagtgtttattgggagaggacccgccggatcgcctctgtgaactgtcgaagtccgtgtttgcggatcgtgtcggccaaccgctctttctgcggttcttccgccagttcccgatacgtttcgatcacggtgtgagcgatcgtaggtatgctgtcagggtcggcgaaaacgtccaacctggctccttcgacgggttctcgccctcctttacccccgatccagacgatgatgccctccttctcggcgtacctggcttcctccggacagacgttgatacacttgccacagtagacgcaacgcttgtaatcggtgtccgccaccgccgcctgtcctcccacagtgatgattcggatcgcgtcgaccttacaggcatccacacactgaccgcatccagtgcacttctccgggtccactccgggcctcacggcgccggcgaaaccgaggtcatggtgttgaggtcgaacgcagctgttcgtgcatccggatagcgcgatcttgaacttatacggggtgggctcttccgctagttcttcctctagctttctggcgagctcttcggtgttcaaaatgcccgaagagcagttgtccttccccgggcatgccatgatcgttcggacgaggggaccctcggaccccgtgttcagtccggtctctcggagccgttccacgacttcgggtatctctgtagctgggataccatggatctcgagctgctgccggtcggtgaacttggccctgtaaccttcttcgaggaaccccgaaatcgcccggaagatgtcgggatcgtcgacccagccacctggaccgacctttagcctgaccgcaaaggtaccgtccgcccgggtgatgactcctccgtagtctccgacccaaaacggtggaactttccgcccctctttcagccgattcttcgcctctttcatggcccagtcgcacttgagctttgcgagccttcgcacatccgacccgttaacggcatctcgaagccgtagatacccggcctcgacagcaccttcaacgagttcttcaccggtctcgctgcggatgaggagggtggtaactccttcgggagttcctacggagccgacggagacgtcggctagtctggcggtgaagtcgttacagatacggcagccttcggggatcgcctcttcaaactccttcacatcgtactccttagtttcaccgcctgatatctcgacgcggagctttcctgaagtgatatcgaatcgctccacgtcctcgatatcgacacctttctctctcaggagcttcacaaggccttcgtactcgaagtttttggtacagaatagtccgatagtggctacgacttccgggagcttctcggccggactcccgtcgatgttgcgcaaggcccgtgcgcctttagctactatctcgaagtgctgaatctttgcgagcccattcacctggcaggggagacctatcgcgagcacacgctcaataccacgatccgcggcttcagccagagcctcaaccagtccaacgcgtgtgtacttggatccggccaggtccttcaccttttcgggatcttctacgacggtaacacacggcttccaagcggagccggcggtcactccgacgacggcatcggcgagaccttcttcgagggcgtatcgggctagtgccgtaacggcgcctccatcttgaccgagttctcggaggtcggaatcggcggcgacagcccctactgcacgccggtaaccgcctgtgagaggttcgtagtcgcggcctgcgatacgtagcccgagatggtaggctgcggtgtcgacacgcgggcacacagtgtgacagttacctgttcccttccgggcgcactcctcagtgagtcgcgggccctcgtccgtgagctcgattatcccgcccgggcagatcgcgacacaagtgccgcatagtgcacaggccccgggctcgacgacttcctcggtaagtttccactcgaattcttctgtcaagtagtgtcccccgtgctctgatgtgacgatactccgcacacatccacgaggctggatctatatatacattccgattaggcttagaccggtgggggtgccgatgctcgcagacgttcccttcgtcaccgtccgaaggctcaacgttacggtccgggacgtacttagatgcgtgctcgggcttcgggacgtcgaggtagacacgtactttgcattgctcgagcgcggtgaagccacggtatacgatctggcggaggaactagatcgcgaccgtacgacggtccaaaaagcgctgaaaagcctggtatacgcgggtttagtcacgcgtcgcaaggaaacccggccgcgcggtgggttcgtgtacgtgtacaaggcggtaccctttgaggaggcgcggaaaatagtccttagggcgctcgacgaatggtacgaggcagtaaaggatgctttggagcgtgcggatgttccgaggtccggcccggagtgattcaatcccctgacggcacgtacgtggtgaggctggcacttccgccgggattcgtcaaggctgagatactgaggaccgtggcggagctcgcggaacggtacgcgagcggtgaagtgcatatcacggtgcgacaaggtctggagatccccgaggtaccgccgtcgaagttagatgatctcctgcgtaagctcagggagctcggcttggagcccggatcgacgggtcctcgcgttcgtcaggtgacctgctgtccgggcaccaggacgtgtgccaacgcactcacggaccccgtaccattggctcggaagttgcacgaagagttcttggacgtgtgggtgccggccaaagtcaagatcgccgtctcgggttgccctcggggctgcacgcggccgagtgagaatgacctgggcctggtagcagtaggtggggatgaatgggaactcctggtcgggggttatagagtcgctagactaccggaacaggacgtcatcgatgccgtcgagttgacgctcgaatggtacgcctcggaagccccaccagggacgaggttgcaccggttcgttacggatcgtgtttcggaacttcgcgacgtgctcgagagattatgagccataggaactgcccgtacaccgggagcttgaggcctatgtaggctcctatcgatgccgcgagaagcaacgggacgatccaaacgggcctgcgtcggtgctgtgtaggaagttcgcctagcccttcggagtattcgacgtggaccgtaggttcaccgtctctcgcgtagaaggcgagtatgaccccggcgacctctagagaacgctccgtagtcctcaccactccgattccggtcggcgagtaacctggctcctttatcaacgtaccttccctcacgacccccagtctcgttccttcaatcctcacctcggcggcccgcagctcggaccctccgtacacgatcaggtatcgatcgacaccgtacgagacgatcgcgggccgaacatcggtagcgtcagctaccttcacgtcggacgctattttccacgccgtccccttaaccagtagcgctgcgtgtacaccgtcggcgccgacgtacgctaaaacgttgtccaagagaacgggtctcgtccccgggacggggattggagcaccgtcgatcgtcgggtgggcgggatcggttaagttaacagccacgacttcggttcccgccggagtctcgtacgccacgaggagatacgtagtcacaggacgtccggctaccgaaacggagaacctctcgacaggacctggagcggataacttgagctccacgggctgaccttgctcgtccgtgatccatctccagacgccgtcgacgtttccgaacaccctcacccgcagcttcccctcgcaccggtacacgagtgcgaaggtggaatcgtccacccggaccggcacagccgcgtcgcctcggacactcaatcccgtccacagtacggcgcaaacgttgtcactgtactcgacgagatcgacgtcgatcctgggcccttccggcgtcatgagcggtacagtcagcacgaacgttgccagatcacgctccccgcgccatggggccgcagccggataactggccacgggtgtcctgatcccggtcttgactagtaccctcccgtcggccttcgccaccgctatgccgagtccctcaggggatttccaagctatcaacgcatgatccgactggagggcgagggccggtggattggatgcagtcccgggacccgggacgtccgccgggcccagctccgccgcctgagaaggacccgcgagcagcagtaacgtgaacagcatcggcagcatccgaggccccggaagcgagtggtgatggcggtgaataaatttcgcaaggggctgagaggttggaacttgagccgaggacggtagttctcaggctgggacatcggcgcgagcgggacaagcggatcacgacgcacgtatgtctgacggctcgagcgttcggagccgccggtgtgctgatctcgggtgaccatgatgaatcggtgatcgagtccgtcgaggacgtcgtcgagcgatggggcggccccttcaccgtgcagtgggtggggaattggagacgtgtgatcaaagattggaaacgttcgggtggatccgtagttcacctcacgatgtacggtttgcatatagacgacgtgatcggagagttgcgaggggagaatgaactgctcgtgatcgtaggcgccggcaaggtccctgccgaggtcttcgagctttcggactacaacgtcgccataggccatcaaccccactccgaggtggccgcgctcgccgtctttctcgaccgactctacgagggcaaggaacttcatcgggagttcgagcgggctaggttgagggtcgtaccctcggagaaagggaagaaggtggagcgactatgacggtggagatcgccgtgatatcggacgttcattcgaacctcgaggcgctgaagcgggtgctgcgggaagtacgatcggccgacatgttggtgtgctgcggcgatatcgtgggctacggtccccgacccgtcgagtgcgtggacatcgtccgcgagtggtgtgaccggtgcgtgatgggtaaccacgactacggcgtcgtcaccggagatgtcgcttacttcaacatcgccgcgcggatagccgtagagtggactcggcgccagctagacgaggacaggcgggagtttctggcgaagttgccgaagaccgagcggttcgaggtggaaggggtttcgatcttcctggtacacgggagtcccagggatccgatatgggagtacgtgtttccacacactcccaggcagctgctggagaaactggtcgataaggcgggtacggacgttctcatcatgggtcacacacacgtgcccatgtacgacgaggttaacggttcttacgtcctcaaccccggtagcgtaggtcagcccagggacggtgacccgagggcggcattcggtatcctcgaagtctctaacggcaggatagtctcatgggacgtacacagggtagcctacaacgtcgatcggaccgcccgcgagatcgaagagcgcggtctgccggaggagctgggagcgcggctgtaccgtggagtttagacatctcggagtagctctaacccgtactcgagcgcttctaggtttcgttccgcgatggatcgcctgggccagctctccgggcgctcacaccaagatcgctgcgtccggtacacccactccacacgatccggggacgcgtatccctcacgacatagcgtgtagaggacctcgacggcgggcttagtgaacacgaccccataccctcgtgcggtcagctccgcgaggacccattctacgcgctccggtggcacctcctggtaaggccggtgggtcttctcgccgtcgtctatgaacgcgggttcctcgccgagtagttccgaaactatgtgcgcccctaaccctcgggttaccagcgtaggtacgtcgccggatcccagccccacggtcggaccgaagaagcgtacgctgagccactcggatcccaacagtctgtgcagttccgggtggactttggcgtacactacccggtctacctcctccttgtccgcttctactccgtacatgtcttccagtggtttcaggttcgcgtccacaaggatgtcgcggcccttttcccggtgttccaccgctagagccgtttcgataacgtcgacgctctcatcacgaaaagctaccagttcgactatcgccccatcgtctcgacgtgctacgaaagccgtcacgatagggtagcgtaagtatggtccgacagagtcgacaacgagccggcgaccgggttccgacatccgaacgcgatggacgcccccttcccgaagcgcccgtcgcatcgtctcgtgcggatccaaaatgccgaccccgttcggtcggaccgtggccccctcctcacgagctcggagccggggtggtaggctcgtcatcccgacacggacccgtgttccagggggagtgtgtccggcccgtcggacggccgttcatccgctgcgagacggccggtcgcggccgccgggcgtgattgtgccggaccgcagcacgcccgccctcatctgtttcaggcgggcccgttccttcggaggcgactcccttccataataattatccctttagagtcctctaaaaacggatgacactggagaagcgacactaataggaacactatgaacggcaccttcagacgaccgaggtagctgcccagagacgggtaccccggatccaagtccgcggtcgcatcgatcagcttcaagatgatggcgtaaagtttccaaggcatgtcgagccacgggattaccagcgtccacccgagcgcgtcgagtaacgcgaataaccacttccgatggtccggacctagcaatgaaaggttccatccgacccagatgcccgggacgaagaacggctctcgcaacttaacggccaagcctagcaggttgccgagtacggctttgctcaaatcgtctaacagagcgatcggcgccagctcgagcgtgagtacgaaatcggactcgatggtttctagcgcgtagcgcggacattgggcggccgtgaccaacaccgacagcgttacgagcccgagctcgatgagataccgctctaccgggtaccggccccgtatcaaagcctcccacgcgatcttaccatccgtcagcgcaccgtggatctcgaccggcatcaggttgaggaggttatcccaggcggagtcgaacgccccttggggatccagcggactcagcgcggccgatatcagagctccgaccaccggtcccgccatagtgacctccgcgtcttctcgcgagacgttatcgaagaacctcgcgggatcctcgatgtagagcagcatagcctccttatgccgcttcctgagctcctcctccggagtacccgggtcgtaaggccccctggtgacgaatcctatcggaggttccgcgtggatgtcgatgcacttcccgtccctacagtggaagagtatcttcggtggaaacacgtcgagctgaacctcgtcaatgcccccgtagtactccgcctccactaaggcgtgacctagctcgtgtgccagcgttcccgtcaagtatactgggttcatgaggtccgcggaccctggaaccgctgcgatcgatagaataagtgcgacgattgtgatccgttgcaaggggagctccccttgcgtctgatcacgttgaccacggacttcgggctcggttctccgtatccggcccaggttaaagctgtgattctcagaatcgcggccccaggcgtcgatatcgtcgacgtaacccacgaagtcccggcacaggacgtggtggctggttcctacgtgatgtcagtcgcgtgtccgtggtttccaccggggtccgtccacgtgggtgtggtggatcccggagtggggaccgagcgtagggccgtcctactggaggcggagcgcggggacttcttggtgggaccggacaacggcctcctgatacctctcgccgaagagctcggtggaatcgtccgggcctttcgtatcctcgaggacgaagtctcggactgggaagtctccgctaccttccacggacgcgacgtattcgccccagccgccgcgcgagtggcgtcaggtgagagtccggagaggttctgtgaacccctagacccagaggaactagtcgagccaccgatcgccgaacctgaagtggacgacggccacgtgcgtgcccaggtgtggttcgtggatgacttcgggaacatcatcacgaacgtcctgtacgacgaggtggacctgcccgagaccgtgacgatccgcgtctccggggaatccttcgaggctaggcacgtccacacgtatggggaggcggactccggtgatctggttgtcctacggtcttcctccgaccacctggaaatcgcggtcgtagaggggagcgctgccgaactgctcggcgtctcgacggccgaccggctcgagattctctactgaccgtgcggaagcggaccgcgcggggttccccggtgcggattaatcccgtcgcacctctgttacggcctcgggctcagccgcccacgggtttctgaggaccttcggaacatactcagcgacgtcttccgccgtgagtccctgggataacctccgctccgccaagcatccggcgctacccactacgaacgccccgatacacgcggcttcgaacccttccctacaccgggctgcgactccggcgacgaccccggcgagtacgtcacccgtgcctcctacggtcatcgccggggttcccgtgacgttccatctgatctcgccgtcgggggacccgatgacgtcaactctacctttcagtaggatggtgcatccgagttcctccgaaacccgccggacggcttccgaacgatcctcgagagatctccccagctcctccccgaactccctcctgaactcccccgcatgtggcgttagaacgaacctatcgtccacgtttacccccgagattcctcgcagtccgtcggcgtcgacgataatcatcccgtcgaaggactccgccagctctctcaggattccgacggagtccgcgtctgcgccgagtccgggcccgactactacagtgtccacgccctcgaggtcaacttcatccaggtgctctggctcgagccgctccgcggggaccgctctgtagataacgttcgggtcgttcttgggcaccgcgtcgacggttagcaggaagacgaggtccacaccggccctgagcgcgcctcgtgcggccagctgtggcgctccaacgtacttccgcgagccgcctatgatcagtacgcggccgtgctggcccttatgcgaccagggatcgcgccgccagatatccgaggtgatgaggtcgcccggaccgcagatccgctcggctatctcggggatccccgcgttcaccctccggaggaacacgtctcgtagcttccgaacgccacgtttatgtcgatgtatcgacactaccaggtccgcttcgacggcgacgtccggtgtctctccgctgtcgggatcgagccctgtaggaatgtcgatggagaccactcgcgtccccgcacgtgaggcctcgttgatccgaaggaccgccgatctcacgggttcgcgcagccgtcctcggatcccgaacccgaggagcgcgtcgacgactacgtcccgctcgaaatcgacgctctcgagatcttccgaatctcggacctcctggacggggatccccgcgcggtccagcctcctgaggttcaactcggccgcctcgttcttgatggcctcacgccgtcccacgaggagcacatcgacgtccactccctcggagtccaggtggcgggcggtgacgaacccgtccccaccgtttccacctgtaccacagacgaccaagacgtcgtttggggagtattccccgatcactaccctagccacgccggctccggcgttctccatcatgaagtcctcttcaaagcccagccaccgcgagttgagctcgatcctcctcatttccttcgaggtgatgaacacggatccacccccaagtgtgcggagaacgggaacgggagcgtactcgttccaccggaagcgtcaaccggggggaaacacggattaaggaccgtgggatttcgtggcaggggaagtcggccgtggaggtccacgagcttacgattctaggcggtaccgataaagatggtcggcccgaacccgtctgagaacttactctggaacgtggaacgatagccgcggtcgtaggtctcaccggctcaggtaaatccgcgctactgcgtgacgtcgaaatcctagcgcagggtgacaccgagacaggccgcagaatcctgctcgacggtgaggaaccatccgatgatctccggttcgatccggagcaccgtcttgttgcccacgtgacccaaaccatgggattcctcgccgactgtaccgtccgcgagttcgtcgagatacacgccgagagccgtggcgtcgacgtcgatccagaggaggtcgtcgatgtcgccaatcgtttcacgggtgaaccgatagatccggacatgaagatgaccgaactcagcggtggtcagtcacggtcactcatgatagccgacgtggctttgatcagcgactcacccgtcgtcctcatcgacgaaatcgagaacgcaggaatctgcaaacacgaagctctcgacgagctcacggcgcgagataagatcgtcctcttggtcactcacgaccccgtcgtggccttacgatccgatttccggatcgtcatgcggaacggagcgatgaccgagatagtggagacgacgcagcgagaacgggaagtcgccgagctcctcgagcgcgtggacacgtggctcctcgacctccgaaaccgcgtccgctgtggtgagcgcctggacgatgtcgaaccacctgcggggatcgagacgtgaagctggtaatagtctcgggcacgcccggatccggtaagaccgccgtcatcctccacgcactggaacgactactcgaccagtacaaccccgctgtcgtcaaagtcgactgtctccgcaccgacgaccatgaggtgtaccgtgagcgcttagggattcccgccaccgacgccctagctaaggacatgtgtcccgaccacttcgcagcttataacctcgaacacatggttcgctgggccgaagaacacggtgcggacctgctcgtcgtggaaaccgcgggtctctgcctccgctgcgcaccctacgtcgatgcctgtcttggagtctgcgtcgccgacgtcaccttaggtccgaactccccagccaaggtcggtcccttcctgcagacagccgacgttgtctgcgtcaacaagggcgacctggtctcccaggccgaacgtgaggtctacgttcggaaggtggccgaggtgaatccagactgtcgggtcatcgaaaccaacggactcaccggagccggctgtgaactactagctcgactgatcgaagaggaagcccccgagctgcccgataccctcgacgaagtcagactccgtgagaaggctccgctcgccgtctgcacgctctgcgtgggcgagacacgggttgccgagcgttaccaccgtggggtgctcaggcgcattgacggattcacggagtaccgaggtgagtaagctcgtcgaactgcttcctgggttccactgtggagcctgcgggtacgaccgatgcgatgacttcgccgaggcactggtccgcggggaggccaagcttgacgactgcccttaccttcaaaccgagcggttcgccgaggagcgccgacggctcgagaaactcctggaggagatcggagaagccgaaggagcgcgccccagcatcactggagtcctggacggctacgaggccgacttagtgctttcacccctcccggacgagcccgcctgccgtgagatcctccatcctttctggtccgaggccgatatcgaggagggtgacgtcatccgctacaggccgtggggttgtcctaccacgcatttcgcgcgcgttctcgatgcggagaagggtctcctgacagtccatatcgtaggacctaggcaccgactcggcgaaactgacttcgagtataaggacgttggcctgtgcctcgtagtcgggttcgaggggatcgtatcggaaggtagagtgcccaatgtcggggagacggtccggttcgtcccggagcactgcatgatgcagaaagttcactctggggtggttatcgaggcagtcggtgaccggttgcgcatagagtgtatcgacctgaaggtttgggctccgccgaagtaatcctcggctcaacgacgtaccatggagttcgttccggtatccctcgcttaagaggaaacgcggcggtttccgctatgtcggagccctggggatgaggagcgaggaaccctgcggagtggtggagtgaagaggggtcgacttaccgaccctctcacctcacgatttccctccatcgtcggacgttctcgtcctcgggttcccagcgcagtgccacgttgctccctacttcgacccctagctcctcggcgacgggctcgcacttagccctcagcaggaagtacacgggcacgtcggggaacggctcctccgggatggactcgaagttaccttgccctttggatatcaccacgtcggcggaggataactcctcggcgaactcctcgctgacttcggtcgcgagcagtccgagcatctcggcccccgtgtcgatcacgtcgcagatctcggtaataccgacttgctcggcgtcctcccgcgtggcgtcgttcactatcggaccaccgcggacggccactaccacgtcgcactccaactcttccaccaacacctcgatcagcagcttatccagggcgatctctcccgcgttatcgcacaggtagagcacgcgtgcgcctctgagatcctcaggtttcaggtcgaagactgcgaactccgcgctgctgatctcctcacggagttcgtcgaggtcgaactcatggcctgctaccgcgaagtcgatagtgttaccgacgatcgccgcggccgcggcccgcttcaggagttcctcagggtcctcgatattctcgagatcgctctcgagctcccgtgcgaccgccgccgcgcgctcgttggcccgccgcttctcctctcggtaggggtccggatcctccgagtacttcatgacggtccgttgtgcttcggtacccagtctcggaggttggggtgtgggttccatccggtacaactcgctcacacgctcggttgcggctaggatggcctccttctgacgatcctccggaacagctcgttcgacggtgtttaccgcgatttcaagcacgcacggtacgcaccgtggtactgccctcattaccgacgcccccgtcacctcaggaacagccactgcaggttgtgtggtaccttcgagtgttctaagggccacagcccgaacggtgccggtgatatcagcaggacgaacagggccaccagcagcaaggcgggtagccagctcttgctctcgtcatcgtccaagaacgagcggtcggacggtagtttcgccgttatcttaaccagcacgatcacggtcgccaccgctatgtggtaccagtgcagccagccttggatgaacgccgacgccacagagaaccacttgacggtgcgggtatcgtagtaatatcgcaggatgtatcctccttcgagcgggtacaccggcagggccgagagccaggtgatgacgagtcccgcccatccagccaacgtgatcgggttcgcgacgattccgagttcgcgcgataggagcaacgtccacgggttgtgccacacgagcattcggacgggcgtatggtcgaacgcggaacctaggaggaacatcgcggtggatagtagaaacccggccaccagaccggctacgcccacccggcacaacgattcaaccagcataggtcgaacttccgagcgaatcaccgaggagaatgcccctgggaagggagggaccgcgaggaaaaacggcaggcgcggtctgaggccttccaccttcgctacccagagcttcgcgatctccttgccgaagtaaatcgccgagaacgcgagtgcgaactccaccgcggcccaggtcgagccgaacgccaaccatccgcccaagtacgcgaataccggaaccgaaagccccagcagagccaaccagcccggctcctgttcgggaacttcgaaacgctgtacgaccagcctaccggccttcccctccggttccgctgtgaatttcatctcagcaagcttcctagccaggcgatgcgcgtctcccttccgctcgtagtggaaaacgaccgaaccgtcctcccggacacggaactccttcacctcgtatcccgcactttcgagggccctttcaacactcttaacgtctttatacgatggaaacatcgacgggtcggcatccgtacggaacacgccctcgactagtaacgtcccaccacatttagggcacttacccttccgctcgtatactacctcacggtcgtggggtttgaattcgaagtaatcgcaattgtcacacacgagcaaggttaccagctcatactcctcctctaccttctcggctgccacgggttccaggggtaactgtcgtctcatttcactcccccaccacggtcacgagcagacgacgagatcgtgggccgtctaactccacgaacagcacggattgccaggttcccagtacgagatcaccgtcggatacggggatggtgacggaactccctaggagtagagcgcgcaggtgtgcatcggcgttgttgtcgattctatcgtgttcgtaccccgcaccttggggcactagctcttcaagcttattaacgatatcacggaggagacccgactcgggctcgttcacgaccacggccgcggtggtgtgccgtgagtacacgtgagcgatccctttctccactccgctctccctaactttctctctgacctggtcggtgacgtcgatcacctgaaccctgcgttccgacttgatcctcagctcggcctggtacactgacaacgcccgcaccccgggggacatcctgtggaactgccgtcgatgaagctcccgtcggcacacgtggagccgctgaagctggccacggcgatcgtaatagccttgctcctcgtgaagatcatgggtcgagcggctcgggccgttcggggtaagctcgaagaggaggacttacaggatttggggtggtgggtggagaagacgctcctgtatggttcttacctcctggcgttctcgatagtcctcgagtccctaggggtgagcctctgggctctcgtcactggattagggctggccggagccggtatcgcggtagccgcccgtgatcttattgcgaacctactagcggggttgtacctggcactggagcgccccttcgaagtgggtgacagaatccgagtcggtgagtactcaggggaggtggttgacctccgaatccggtgcacggtgttgaagtccagaggtcggaggatagtcattcccaactccgttctagtcaacgagaccgtggagaagctggacgactccgacgaatgcgagttcgaggtcgtagtagagggatccccgggtgaaatcgggcgccggttggccgcgctcgaaaaagagttggactccctaaagctgaagtattacgagatctcggtggaacgtgtggagtcgggcaggacgctggtccgggtgcggacggctgggaaggaagtggatagtgtgcatggggcggttcgacgcgcgctcgtgaagaggcctggcgggacagaccgctgagggatgacgattaaccgggagccgggagcggattccgccccgatcccttattgttacacagtccgcaacgaaccggggatccggtttatagttactttcactctactcctcggggggagtttggtggagatcaacggagtacctgtagaggacacgttctgtgaggctttcaaaggcttgtacgcacggttcatcgtgacggctgccgacgagcgtcccttgcgtgaggctgctgagaacgtcgccgctctgccggctaccgtcttcggcgaatctgaggcaggcgtggaacgctggttggacccggaggagaccccggacggtcgcccggggttcgtcgctcagatgtgggtggagtacggtgatgacgccgtgaagaaactggagcacgagctcgggaagcgcatacgtcagggtgtgctggtacgaccgaccaccagggtattcgacgcttgcgaggatccggacggctacatcgacacggaacgccccatcggccgttgcgccgacgggtacgaatacaccgacgtacgtttcgaccgggagatggtccacgttccgatcatgatgggcgagttcctgatcgagcgtcggctggggtacgcggaaggtgtcgcagggggcttagtatggctgttctgcgaagacgtcgatgccgcgctcgaagccggttaccgggccgttgaggccctgcgagacgtagaaggcgtcatcactcccttcaacgtctgtgccgccggttcgaagcccgaaactatctacccggacatcggtccgacgaccaaccacccatactgtccgaccctccgcgataggatcctcgactcgaaggtcccggaaggtgtcgaggcgatccccgagatcgtgatcaacggggtctcgctcgacgtggtgaagcgagcgatcggaatcgctatcgaggccgccacggaggttgacggcgtcgtcaaggtgtccgccgggaacttcggaggtaaactcggcgactacaggattccgctgcgggagtgcattcgggagtgaggagtgttggacgtagtgggtctcggcgccctcaacgtggacgagcttctgtacatccctcgaatgcccgaacgcgacgattcggtacctgtcgaacggagagtacggcggggagggggatccgcggcgaacactatctgttggctcgcccacctcgggagagaagtggggttcgtcgggaaagtcggcagcgatgatgctggggatctcctactccgggagttcgaagagtacggcgtcgatacctccagagtcgtcaggggtgacggacacagcggtacggcgttctgtctggtctccggagacgataggagaatcctcgtcgatcccggggtcaacgacgagcttcgaccggatgaggtcgatctcgattacatccgtaaggcccgcgtactccacaccagctcgttcatcggattacgatcggagacgtccctagagaccctgaagcggaccatgaaggcggtagcggacgagctgatggtgactttctctcccgccacgatggtcttgcgtggctggtcctacttggaaccgtacttcgaagccgccgacgtcgtgttcctcaacgagacggaggcggttcacttgacgggcgatatcgaggagaccctcaataggctggccgaactcgtggaagtaacgatcgtcacccgcgggtccgaccccgcgatcgtccaagaagggaccgagatctcggaagtggccccggagcccgttccggaggaggacatcgtagatcctacgggggcgggggatgccttcgcggccggattcatcgaaggtattctacggggtgaaccggccgaccggtgctgcgagcgcggtcacgcggtagccgccgagtgtctgagaatcgaggggtgccgccctcccacggaaggacgctccgaatagtggctccgaggataatcacctcgggatgaagtccacgagcttgtgcacttgcggcaacacccgcacgtcggcgttcaccagcccggctaactcccaaagatcctcgaggtcgtgctcagagcccgtcgccggttgtaggtatatcggttctacacccagccgatgaagccccttcagtgcgctctcagcgtgctggtaacattcctcgtccaccagtactaccttagcgtaaacctccgcgctgatcctctcgaggaacctcagacaacggtcgggaaaatcgtccatgttgggtccgtgtgacggcagtttcacgtccgcggaaactacatccgccaattcgtcgatcaacggagctcggtcaggtagtgaggcattggtctcgagcagtacccggaacccgcgttcacggagcctctcgatcaactccttcagtgcgccccacggctggacgagaggttctcccccggtcaacgagacggttccgaacgtgtcctccaggtcctctaattccaccagcacttcgacgacgtcctccggtccgcatgggaccgggagctcgagctccacctctccgctcacacgtcgaatcagggccctccggcggctgcttcgggaggctggctcgtcacagtatgcacatctcaggttacaccctgagaatcggacgaacgcctgcggctcccccacgaacttgccctctccctgcagtgagaggaacacctcgtacacgttcaatccaggcgtcggacgacctctgccccctgtccccatccttcgtccacccggacgcgtagttccttcagattgtcacccgccagcctgcgttccaactcgtccgctaggtactccgccaagtcttcggccgatagtgaacgggtagggatcaatacaacatcctccctgggaaacacgtagcgcttgccgtccgacagccgaaccgtgatctcgttcccagattcctcgatctcgaaaagttcggactcggtcggtaacaacacccgatgatccaagggctttatcagctctcgcaccgtgcttttgagctcgtcgaagtcgtacacgaagccgtgtggttccgtgcgctctccgagtagctcaaccgacacatggtacgtgtgaccgtgcaagcgaccgcacttaccatgtcctggaatcacgtggcacgccgaaaacctcagccctaactccctaccgtccaaatacacgcgcggcaagcacgcacccccggccgatgacgagcagccggaacaccgagtggtgacgagccctggctttaccgaggcctcgggtcggcggttaaggccctcctcatcggctcggccaccgccgtaggtcctcatccccgactcgaccggcgagctaacagtattaacggtgtacccgggacgttcgggggtgtcggaggttgcccgtggtcacgatccactacgataagctcgtgaaaatactcggaagggaagtctcgttcgaggagctagctcataatctcatcccgatgctcggtagcgatgtggagcgaatcgacgagcgtgaaatggttatcgagacagagttctttccgaaccgtcccgacctgtacagcgtggagggtgttgcgcgggcactcaagggatttctggggatagagacgggcatacctgagtacaacgttcgtcgctcggacgtggaggcacgggtcgaagagagcgtactcgacgcgcgcccctgccttgcggtcgccgtcgtccgcggcgtcgagttcgaggacgagcgtgacttggagcacctcatggagttccaggagcacctccactgggtgatagggagggacaggaaaaaggctgcgatcggtatccacgacttcgaagcggtagagccacctctcaggtacttcctcgcggatccgaacgacaggtcatgggcgttcgagccactcgaccacccgggcgaagagatgacgcctgccgaggtcctcagacggcacgaaaagggccggcagtacgctcacctggtgtccgacggggccccgatcctcgcggacgaggagggagtgatctcgttccctccggtgataaactcggagcgcaccagggtcacgcaggacacgacggacctgctcatcgacgtgaccggtacagattggcgatccgtgttggacgcgcttcacgtgatcgtgtgcaacctggccgaacgcggcgcggaaatccttaccgttgagatactgggggcctacgagcggacgactccaacgatggaactcgatgtatgggacgttcccgtgagcgaggctcggaaactgttggggatcgatctctccggcgagcagctggaggagctgctggaacgcgctcggcacggggcgatcttcgttcccgagggtgagcgtgagctccgggagtacccgctcccggatgtgtaccacatcgaggctgattggcgtgagatccctccgatactctacgaggaggacgtggtacgggtcttcgtagggccccggcggacgaacatccttcacgagtgggacctgatcgaagacgcggggatcatgtacaattacgaccggttcgagcccacggtacccgacttctacacgccatcacgtgccgatagggagcgcgaattcatcaacgtcgtgcgtgataccctcgcgaggatgaagttcgtcgaggtgaactccctgactctcatcagtccagaagagaactatcggaaaatgcgcctcgaaccggacggccgcgcggtgaagttagctaatccgattcagaaggagtacacgatcgtacgaacgtggatcctcccgtctctgatgcgtttcctcgcggacaacaagcaccgtccgtatccgcaacgggtgttcgagctcggggaggtgatcgaacgggacgaggacgcggagaccggtgccaaggaccggtggaaactggcgctggcgatcgccggccccggtgtgggcttctccgagattaagtccgtggtggaggcactactgcgcgaactggacgtcaccgggtgggagattaccgagagaaaacaccgatcatttattaatggaaggtgcgccgccgtactcgccgacgggcgggagctgggtttcttcggtgaaattcatcccgaagtactgactgagttcgacctcgaggtgcccgtagtgggtggggagttcgacgtcgcggcccttagaacggccgccgggtggtgacacttggagcagatagtgaagaacgcgctggagcgcgtcgaacgagagcaggggggcgacgacccgccgtcgtcccgggggaccgacgacgatcaggagttgatggaagtccttgagcgggcccgggccaggatactcgtagtcggtgtggggggagccggcaacaacaccgctactaggctcaaagaggaaggtatcggaggcgccgaggtaatagcgattaacaccgacgctcaggacctcgtttcgtgtaaggccgaccggaaagtgctcatcgggtacgagctgacccgaggattgggtgccggtggtgacccgcgcgtcggcgaagaggcggctaaggaggacatggagaagatcaaagaggtcgtcgagggcgctgacatggtgttcgtcacctgcggtctcggcggtggcaccggcacgggagcggcaccgatcatcgccgaagtcgcccgcaaggagggagcgctcacgatcggcgttgtcacgctcccgttctcggtcgaaggtaggaggaggatagagaacgcccttgagggtttggaacggttgaggcaggtggccgatacgtgcatagtcatccctaacgaccgcttgttagagatagtcccggacctccccatcgcggcagctttcaaggtggcggatgaagtcctcatcaacgccgtgaaaggaatcaccgagatgatcacacagcccggtctcatgaatctcgacttcgccgacgtgagagccgtgatggagaacggaggtttcgccctgataggcataggcgaagccgagaacgattccgagtccggtagccgggccgtccaagccgtggagaacgcacttaacaacccgctggttgacgtcgaagtgagcggtgccaccggtgccttagtcaacatcgtcggtgggaaagatctcacgcttaaagaggccgaagaggtcgtggagttggtagcttcggaactgtcggaggatgccacagtcatctggggagctcagatcgacgaggacctgaacgacgtgctccgcgtcaccgtaatagttactggaatcgaagacgccgacctcgaggccatgttcacgggtccaagacagccgaaacgtaccgaggtgaaggaggtggccgccgagtcttctcggcccgaaaaagtccccgaggtgtcgaaaggaggtgcggaatcatccgaagatgagagaccgtcctcactcgaggatctggagaagatcctctaagggggccaagattccgtgagtacctacgaagaactgatctccctgttacgggactgtaagcgcgtccttcgagccgcccggaagcctacctgggacgagtacatagagtcggctaagatcgccggactcggcattctcatcgtgggcggagtagggttcctgatcagagtgatcgtgcagttgatcgagctctacacgtgagtggggtaggttggattggccgagaccgactcgacgaagctctacgccgtccgcgtgcaggcgggtcgagaggaggccaccgctgacatgctcgtgatgcgcgctcggaggaaggtcaaagaggaaggtatcgaaacgggtctaaaggctgtgatagcacccgaggagctccgaggatacgtaatcatcgaagttgaggagttaaccgacgagctcagggatctaattcacgatcttccggatacgcgcggtatcgttgagaaacctatggattttgaggagattgaacactacttcgcgcctaagcccgaggccgtggaaatcagcgaaggagacgtcgtcgagatactctccggacccttcaagggggagaaggcacgggtcgtcagcgtggacgagtcacgtcgtgagataacggtcgagctgctggaggcccccgtacccatccccgtaacggtaaaaatggacgccctgcggctcctgcgggaggaggagtacgaagggtaaaactaacgaattaggggtgcggtaacaatgccgaaggaagaggttgaagttctcatcgaaggaggtaaagctgaccctggaccaccgctcggacccgctctaggtccgctcggtgttaacatacaggaagttgttgaagagattaaccgtaagacgaaggacttcaaaggtatggaagtcccagtcaagatcatagttgacacggagaccagagagttcgaagtgaaagttggatcacctccgacttctgcgataatcaagtcagaacttggtattgataagggagcgcatgaacctagacacgaaacagtgggcgatctctcgatggaacaggtgatcaaaatcgcgaaaatgaagttcgacgatttactgtcatatgatttgaagacggcggctaaagagatcctaggaacatgtggaagtatgggagttacggttgaagggaaggatccaaaggaggttcagaaagaaatcgacgaaggaaagtgggatgacctgttcgagaagtacgaggaggaagaggagtaaggggtgagcggaagtgacgattaccgaggaggacttgatcgaaccgctccggaaggtagtggagtactccccaccccgtcggttcctcgagaccgtagacatgatcgtcaacgtgaagggagtcgatctctccgatccctctcagcgtatcgacaaagaggtcgtactccctcacggtcgcggcaagcccgtgaacgtttgtgtcatcgcggaaggtgagatggcccgagaagctgaggaggccggggcgacggtcattaaccgcgaaaagctcgaggaactcgcggagaacgtacgcgaagccaagaagatcgcccgacgccacgagttcttctacgctcaggtggatctaatgccggacgtgggtagggttttaggacccgtcctcggtccccgcggcaagatggccaagccggtgccacccaatgccgacatccgtgcactcatcgagcgggcccaccggaccgccagagtacggatgcgcgaccagccggtcattcacactgtcatcggcgccaggaacatggagccggagcaactcgccgagaacgcgatggcggtcctccgggagataacctccgagctcgagaagagctgggcccagatagactccgtgtacgttaaaaccacgatgggcccggcggagcgggtgtactgatgggggactgtgcgatggccgtcaaagcgaagggacagccgccctccggctacgagcctaaggtcgcggagtggaagaggagagaggttaaggaactcaaagagctgatggacgagtacgagaacgtgggtctcgtcgacctcgaggggatcccggcaccacaactgcaagagatcagggcgaagctccgcgagcgtgacaccatcatcaggatgtccaggaacaccctgatgcgaatcgcactggaggagaagctggacgagcgacccgaactggagccgctactggactacatcgagggtcctgtggcgtttatattcacgaacctcgacccgttcaagctgtacaagcttctggaggagagcaaagcctcagcgcccgctaagccaggcgacatcgctccagaggacatcgtcgtaccggaaggtcccacaccgttcgaacccggaccgatcgtaagcgagctccagcaggccggtctaccggctcagatccaggacggaaaggtagtcatcactaaggacaccgtgttggttaaggaaggggaggagatagacgaaaagaccgccgagatcctcaagaagctcgaaatcgagccgatggaggtaggagtcgatatcgtagcgatcgtagccgaagggacgctattcgagcgcgatgatcttgcgatcgacttcgacgagtacgaggacatggccaaggaggccgcgcagcacgcgttcaacctgtcgatcaacgcggccataccgacggcggagaccgcggacgttatcgtcgcgaaggcgcacacggaggcgctcaacctggcagtcaacgcgggagtgccagtaccggacgagacggttatgggatgcatcctggccaaggctcacggagagatgctggcactggcgggagctatcgccgaggtggacgaggaagctctcgacgaagagctattagagatggtgagccggtcggccgaggcggccgaacggaaggaaaaggaggaagaggaagaagaggaagccgaggaggaagaggcggaggaagaagaggaagaggaggaagaagaggcggcggcaggtctcggagctctattcggttaaccgaccacgggggccctattccctgcctcataacgtcgttcttaccggtcgtcccggtatcggtaagaccacagtttgtctcaaagttcgtaacgttctagaggaggagggctacaccgtcggcggaatctattgccccgagatcagggagggtggtcgacggataggcttcgagatcgtcgacctcaccgagggtgaccggtacctactggcaagggaaggagcttcggggcccagagtcggtcgttacggggttttcgtcgataacctcgagcgggccgccgaatccatcgaacgtgccgtgaaaaggaccgacgtcgtgatcgtcgacgaggtcggccccatggagctcaagtcgaacgcgttcgtagacgccgtgagacgggcggccgacgcgcacacacccgcgatcttcgtagtgcacgagcgatcgcgacatccagtcgtagtggatcttagggaggaacgccccgacgtcgtgcgtttccgggtcacactttccaatagggatgagttgtccgacagaatcctcgagcacgtgcttgagtggttggaggagaggtgatcgttttggagcatctggaatgtgacgtgctcgtgatcggaggtggtggtgcggccgcccgtgcggcgatcgaggccgctaggaggaatctgaacgtggtgatcgtctccaaaggtgccgtgggtagaagtggatgcaccgtcatggcggaagggggctacaacgcggtcttacgcacggccgatccggatgactccttcgacgctcacttccgcgacaccgtcgagggaggcgcctacctcaacgatcaggacatggtagaaatcctcgtacgagaagcacctaagcgcttactcgacctagagaacttcggagccgtgttcgaccgtaacgaggacggtaccctagcccagcgtcctttcggtggtcaatctaagccccgtacttgctacgccggtgaccgtacgggacacgagataatgatggcgttgctggacgaagttcgccgcctcgacggtatcaccgttctggaacgcacaatgggatacggactggttcgagatcacgacggaagggtagtgggcgcggtatgcgtggaccttcaaaccgaggataccatcgtcatcacggcctacgccaccgttctagctacagggggcgcgggtcagctctaccccgtcaccacgaaccccgtccacaagaccggtgacgggtacgccatggccttacgcgtcggttgcccgctcattgacatggaaatggttcagtttcaccccactggaatggtgtatcccgagagcgttcgcggagttttggttacggaagccgttagaggtgagggaggacggctttacaacgccagaggcgagcggttcatgaagcgctacgatcccgagaggatggagctggcgacgcgcgacgtcgtagctcgggctatttacagggagatcaaagagggacgtgggacggagcatggtggagtttacctggacgtcactcacctgcccgacgaggtgatcgaggagaagctcgagactacgctcaagcagttcctgcgcgtgggcgtggacattcgaaacgaacccatggaggtggctcccacggcccatcacttcatgggaggggtcccgatcgacgccgacgggaagacgccgatcccgggtctcttcgcgtgcggtgaggttacgggaggtatccacggagcgaaccgactcggcggaaacgccctggccgatacacaggttttcgggtaccgcgccggaagggccgccgccgagctcgccttgaagttacggagacgaggtcgtaggatacaggtgcgcaagaccgatgcgccgacggtggagtccgagatttggtccaccgtcggtcaagaggatccgattcgagtgcgcgagaagctccgggagacgatgtgggaatacgtgggtctggagaggtccgagaaaggtctcaagacggcgatcaaaaccctcaacgagctcaaggagaccgtggaatccggtctagacgatgaatacgggttacggccggtcttagaggtgcgcaacatggtagaggtggctatcgccgtcgcgcgatccgccctttatcggaccgagagccgtggagctcactatcggtcggattatcccgaacgcgatgacaaacggtggcttcgtcacactgtctacaggcccaacggctctctggccacccgtcccgctaagatcactcgactggatccccgtcagtgattatgtcgacgaagcggatctcgtccggttctaccttcactaaccctcgatccgtgagcctcagttccgggaccaccggaagggtcacgaaagatagagcctggaacggatcccaatcgacaccggaactcgatcgaatcaactcgagcacgtcctcgtaggatttcttcacctcctcggggtccgaggagctcatcaatcccgccacgtccagtcgtacgaactcggctcggtctcccgcgacggcccctacgcaccctcccacctcggagacgagctgcagagccctgcgcacgtcatcgaggcgtctacccgcgaccaccacgttgtgtgagtcgtgagctaccgtggacaccacggcacagtcgagttcctcgaacccttccacgaaccctatcgaccagctgccctgcccgtatcggtccgtcacgaccagaaacgccacgtcgtcgtccttcaccgctccgtccttgacggtgatctctcgtacgatttcttccgtgcgaatggaacctctcaccagcccaacgcacctgacctcgtatttcccgtcctgaaacgatacttctctcgggtcgacggagagctcgacgtcgggtaattcggcctccgcgtctcggaaccggacacgttccgaacgtttgcctccgatccacacgtccgtgagttccatgttctcgtcgagatcttcgaccaccactatgtcggcatggaaccctggtaccaaacgtcctgattgtaagccgtaacacagggacggattcaacgtgaccgcgctgagggactccagcggatcgaaacccgcctcgatcgcacgccctactattttccggagtgatatttcgtccatgtccttaacgtgcagatcgtcggtaacgaagcacacaccgcggaggtcctccaacgtttccagtgctacttccatgtccttcgaggatgagccctgtcggacgaaggtccagactccgagctctcgtcttgaggtgaattcttccgcggtcgagcactcgtgatcggtctcaggaccggccgcgaagtatcgcatcgcttcgaaccctgtgaggccgggggcgtgtccgtctaccgtcagaccgtacaggctcttcagctcgatgaactcgtccttttctccctccatgactccagcgacgtccatcagctctcctacggaaactaccatgggatggctcgcaaactttcgagccacgtcgaccgtgatctcgccttccacggtctcgtagggaggccctagtgccgggacgcacgacggtagcgcgatgtagaacttaaacggcagggcttcttccgcggtcttgacggcccattcaagtccgagctcgcctgagacgttcacgacctcgtgagggtcccaaacgacggccgtggtgccttcacgtacgacgatttcggcgtatcgggccggcctcagtccggaactttccacgtggacatgagcgtccacgaacccagggcagatgatcccgtcaacgtcgatcacatcggcgtgctcgggctcatttcgcgtcactccaagcagcctacctccgtcccagatcacgtacccggttcgaattcccgagaaccaagggtcaacgaatcgaccttggaacgctcgcgactcgtttccccccgcgggtacagcagggaggtaggcgcgcgggatcacggtcgggccaccgacggccctctcacccgcacacctgtggcccggcggagcccacgcgggatcatcctcgggatccccgcgtcccccgcgccggttcgaccgggccatggtgctcggtagggaaggagacctatgaacttaccgctagtttcctcagatttcggatgtacaggcaggaagttaccaggaagtggtacagaatcgatgttcctaggaggtacctcgcggcggcgtttcctacagggagatcggtggtaggtggtggtgggatgaacaactctctgatactgtaccggcgcccatcctccgcgttgtagtactccttcgtggttactatggacaccgctgaggcggtgagaaagcaagcggccgtcgagaggaccatagctccttgcttccacgatatcaggcacaccatcgggcacccgacggcccagtagtttgggttcaccaccttggagaacgctaacaacgctagtccgatgcacccggccgcgagttctggattccctcgcattgctagcggaacgacgacggagagcgtcccgacggcggcttcgatccctggacatccgggtaacagagtccatatggaacagttctgaggagaacggttgacttgaaagattatgacatcgtggacgaagtcccaaccgttagcgatgaggtagggtccgcaaattagtacggaagcgaggagaaacgtgggaatcgattgccgccggaggaacggaagggcgactataccggcagttggcttcatccataacgccgtcgctgcgcataagccggccagcttaccttcacatactgcggtggccagcgccggtaccatcgagatagtgtccagttgccagaacacacacgggtacgccattgaggcggcgaccaccaacgttccgacgttcccaaccccggctcgccggatcaggtagatgcacattatggcgccgagccacgccggcaccttccacaacactcggaactcccaagtgtgggggctaagccccagtgtgtgggtgccgatgtaccacacgagggcgggtagcagcgatcctagtgggggataatggacgtcagtcgccgagtaatacgagagaggacggctgcacacgacaggacaccagcgcatccacttctcgaagtccggcgcgtagaccaccgttaacagccaccatagcagatccttcattccgccacctccggatcagtagctcgtgccttcctcatccggctcggcgaaggccagactcatcatccctggagtaagaatcatcgagtaaggatcgttatggtttcgataacaattccagctgggggcgtaagaagatgtgggggtttaggcgaggtaccccgcgatcggcgaggccagcatcgtcagcagctggtccagagccttgaccactggcgccacgatctgcgctgcggtcgctacgcccttgtcagccaggtatcctagcaccgtgctcacggtcggtagcgccaggccgactgcgctagcctcggtgattacagctgaaccctctagtcctagttcctgtgccaggtctacgagtgggttctccacgtcacctacgcctagcgcgtacagcagcggcgctactaccgcgcccgccatggtgcccacgtcgagcatcgacagcgtgttcggcatcacgttgtggtccagaccccaacctgccagcaggtcggttgccagcaccatcgccggtagaacggcacctacgtcgttctcagcgaactccctgagtcctaggtcgtccaggaagttctgtaggtccgtcttgtagcctagcatgtcgctgagtgggtatcccatgaacgggtccagtagcatcagcgctggcaccgctagcagtaggtccttgaccacggctcccgccaggtgtgtcggaatcgccggcttcggagctactacggtcacctcgacgctctgcgtggcggttccaccggtgatcccgtactgcggtaggtctgggaacttcgcggtcacggtgatcgtgtgcttaccttcagtcagtttcagggtcgtgctcacggtccgggtgtctccgagcttgtacggcgggttgatcgtcttcgtgtccactgtctgcccgtcgactgcgaacgtcaccgtggttggggtgcgcttgatcgtgtacgggtagttacccgtccaggtgattgtggccgtcacggttacgtcggcggtcgtctggcccttctccagctgcacttcggatggtgcttctacggactggatctgcggcttgatggtgtacttgcctgagtagaccttggcttcggcgccgcccactagggcgacggccagcgccacggccagcgccagaagcacgcgcttcacggcggtttcacccccagcctccggtggtccggggcgttatattacctttttgggaattttcggcatgggcctagtcctcaaaccccatcatcttcctcaaccgctcgcctaccttctcgatttcgtggttctctatctcctcccggagacgcttcatgacgatacgaccggactcgttctcgagtgtccactcacgggcgaactcaccgcttcggatttcttccaacaccttccgcatctcctccttgttgatgatgcgcttgcctctagtgagcccgccgtactccgcagtgttggagacgttatcgagcattccactgaggcctttctcgtagatcaggtcgacgatgagcttcagctcgtgtaacgtctcgaagtaggcgacctcgggctggtaacccgcttcgactagggtctcgaacgcgtagaggatcatgtacaggactccaccgactaggtctacctgctcgccgaaaaggtcggtctccacttcctcccggaacgtcgtcttgatcacgccggcgcgggtgaaccccatcgccttggccatggcgagggccaggtccatcgcctcgccggtgtagtcttggtgtacggccactagggccggagtaccgaatccttcggtgtacagcttgcggaccatgtgtcccggccctttcggggccaccaggatgacgtcgacgtactccgggggctcgatgaggccgtagtggatgttgtaggcgtggctgaagccgagcgcgttccccttctccagattgtcgtggatgtgctcgcggtaaacctgcggctgtacctcgtcggggatcagtatgtggaccacgtcgccggcctcggcggcttccgggatcggcagcacttcgaaaccgtccttcttggcccgctcccaggatggtcctccctcacgtacgccgatgataacgtctataccggagtcccggaggttcttcgcttgggcctcaccctgcgatccgtacccgattaccgccaccgttttgtcctcgaggggttcgagggaggcgtcctcatcgccgtagatcttggccaccctgtggtccccctcacgacccactcacgatgccttccttcatgaggtccaggaggccggcttcctccagcgcctccttgacctcctcgtcggacgcgccccggtcgatgtcgactttctccggtgtcggctccaggtgcttgatgttacagcgacgacgcttgacaccggtcacgtccttgggtcctgtgataatcacgaaattctcatcaacgatgtccacgacgacacagtacttgcccgcctctctacccgcggtcttcacgcagatccttcccacctcgatcggcgccggcatgcagatcaccccggggagttcgtcgattggcgacagtagtaatgaagaggctgatcgcggtcaccttggtcgccggcttaacaatattatccttctgcggatacgaatcggtcgcaaaagctcccacgtggaaagacgcagagcgcgccttgtatcactacggtctatgcttggtcctgtcagcgtgttcgatccggcgggttccagggtactcgtccgtgaacatactactacatgggtactccgggacgtccccctctccggttcccctccggtggtggctcgcatggcagacggccaaagtgatcggcctctccatactactttctgggtttccggccctggaggtgctgaaatggatactctccggtgatccgagtcggtgggtactcgccgcggcggtactgttcggacttgttttcaaggtccgagcgttcatgagtgtactgtctcagctagccgtcactatacttgacatctccgagtatcgggccgataagaggctcctacagtccgccttggtttctcacggattacgcacgatctcgttgctcctcgtgtatctagccgttgtgcttatcacgtaccccgtgatctcactgtgtcttcttccaatgatcatcacactaggctggatcgcctggtacctgcacaagatgtcgcgtcttccgtggaaggaccacatccaggtgtgtcgagtgctcaaaaaccgcctcaggcccgtcctggtgagttccctactactctgctccgtaaccttcaccttaggcctgactacggattattttactaacgtcagtgttcgaatctgggagtacgtctcgggggagcacgtcaggacggtccacaccctcgtacctgcggtgctcttggatcaaacctcgctgcggcgaatcgccgaaacacaccgggcggatatgtctttcctaaccctagacgtactgcgggatagggtggtcgtgctcataggaggggaaagtgggcaagccaccgccatagatccaagaaccggtagatcgttgggatcacagaagctgccgcccgaactccgtgagtcgagtgtcgaggctctaaccgaggacctggagtacgcttatccgtaccttcgggcgggattgcccgtactgtactctggtaagctgacggtatccggatgggtcgtcgccgacgtttggataccgttcgccggctacactctgatgatccctgaaatcacgttagaagttcggggcagggggttcaaacccaccgaagctccggcgttccccggcgttgattggggcattacctggtatcccgcacgtctggacggtcggatcgttcccgtggtaatcccctcgacggtctgcttcactagttccatcagggtgcccggaagcctcgtaataccgctgtacggacccaccgcggtccgagtgtggctccaccagccctgtttcatcgagatcgagcgtgatcgtgtatacgtactgaaacccgagtactacccggatggtatcttaatgaaagtcgagaaaatccgggtgtaggggaaacgagcgtgataaccgtagtgttcacggggtacaagggtgggaagctcaggttcgtgctggcagagggtgacccggaggacggtgccgagatttcgatcgagggtcacctggagctctccggaggcggtgaacccgttcgaggggttctgggcggagaaccgacgccacccgaccgcgtgttaagcgagctacagaaagcggacaggaagatagccctccccgacgttgcggaggtggtcgatcgagttctgggggagaaaatcgaggttaaggagctctgtcggagatgcctcgcgtccgatcgagtgaccgtgttgaagcacgggtaccggttcggtgaagtcgaagtgtgcgggcgctgcgcccgtgagattctggaggaggagttgaggttccgagtacccggcttctcccagactcttctcgagaagctcgagagactcctacatgagctccgcgacatagatcgcgtcgtggagatggtggatccggcgttcgatcccgccgaagaagaggagaagacgcggtgggagattgtagaggccgaggacgaggaggaacaccgtctcccactgaccgagctcgacatcccggaggaattgcgtcgagttctcgaaaggatggggtatcaggagctgactcctgtccaaacgaagtgcgtcgagcgaggactcctcgagggccggaatctgctggtcgtctctcccacgggttccggtaaaacgctggtagcggagctcgccggactcaccgaagtcctccgagaaggtcgtaagatggtttacctggtaccgctcgtggccctggcgaaccagaagcaccgggaattcatggaaaagtacggacgaccgttagggataggtgtcaggctacaggtcggcgcggcgagattgaaggagttctctggacccgaacgtggtccgtcgccgcgtgacgccgacatcatagtcggcacctacgaggggttcgacctcctccttcgaactggggccgtagatcccgacgatatcggtgtcgtagtaatcgacgaggtacatacgctggctgacgagagaggtccacgcttggacggtctcgtatgcaggcttaagacgctaaccggtgcgcagttgttgggtctctcggccaccgtggggaaccccgaagaactcgccgagtacttggatgctgaaccgatagttcacaaccgccgccccgtacccctagagtaccacctcgtgatcaatcaagatcgccgacagaagtgggatagaatcgccagactcgtggagtcggagtgggagaccgagtactccacggggtataggggtcagactattgtcttcacgtattcgcgcagaaacacacatcgattggccgatctcctcaatgagagaacgggactagatgtcgccccttatcacgcgggactcccctacgaccggcgccgctccatcgaacgagccttcgaacgcggtgaactggccgcggtcgtaaccacggcagccctcggggccggcgtggatttcccggcctcgcaggttatcttcgagagtctggctatgggtatcgaatggctcacaccgcgcgaattccagcagatggccggtcgtgcgggccgacccgggtatcatgaccgtggtaaagtcgttctgatggtcgagccgggccgccgttaccaccgttctcaaagtgagaccgaggacaaggtggctttcacgctcctcgagtccgaaccggaacccgtagaagtcgagtacgatgacgaggacgagagagagcaagtgcttgcacacctcgtcagcggggcggcgaagtctccgggcgagctcgaacgcgtatgtgacgaatcactaggcttcgctggggatccgatgcgtagggtgaaagagctccgggagatgggtttcgtcaaaggactcgagcctacggagaaaggccgtgtcgcggctcgctacttcacgggtcccagaaccgtccacgagctgtccgccagggcgggctcggatcctctgagggcggtcgcctcggtacgtccgttcgagaggttccagctgtcaccgtcgatcaagcgtgcggtagaaagggtcacccgcatgtcggttccatcgagactggacgacgctctgagcgtgatacactcggagcggaaggaggtgatcgagaggcttccgcccaaggagaagcagaagctggtctcgctgatgaaggagttagactgtgggtgtgatgccttccctcactgcgagcacgtcagccagcgcgcgtcggagctcgcgctgaaggtgcggctcgaggggaaatccgtgtacgccatccctaggatcttggagggcaggtacgggataacggcgtaccctatcgacatcgcgaactggttggaggaggtcgtgcggctcttggaatgtgccggtgagatcgcggaggaaccggagatggcggcggccgctgaggcgctggccgatccgtggtcagaacggtagcggtggtggtccgactctaccctgctgcagtactccgagtgcccgtttcaactctccttccggattcgtcagggttggtacctgaacacctaaacctcgagcgattagcgccagctttgacagtctctgggtcagtctgttgaacgaattgtaggcgtccatcagtgagttgatcgccagtgcgatacctagacaacggactatcggttcgtacggtctcacgatttcgtcggtgatggtcgacgtcagatcggagatcatcgacttgaggtcgtctaatatctcattggcggtttcttcagatatccccagcttatcggcgttcttaactattgttctgaaagtttcaattatactattccccgtatcctcggttatttgtcgtatagtttctactgggttcgtagcaattcttactcctatcattgcattgttaatatctctagtgatattacgtacatctgatatggtgccggaaacgtctggaactactggcgacaacactgatccaatccacagttttataccgttagagggttctacattaatgtatcgcagggcgaacttacaaacgtttgatgctataaggactccggaacttcccctgataccattcaagaagttcgctattgttttagcaacttcatacttagtatcttccgttaacttgctctgtgagctttggtttgaactctggtttataatctgtattgctgaatcaataaccggtataacgtcttcaggactcacgggtctatcctgaagcttagccatcagtttgcacgtttgaactatgtaattcttaataacatccggtggtacttctaattgttctgaaagtggttgcagcatcgagtataacattgaattcaccaacataggtgccacaatgttgaagcctacttctccccagtacatcggtgatgacagcttctcgtacgtcctattgaactggtatgctacgggatatttcagcggtaggccgtggtccactgcggcggctaacgtcagcgcttcggctcccagttgggtgagatccgcacctagctcctgggtgcccctgttcggaatcgcgcaaagaatggctcctacggcgatataacccagtgccttaggggctacctgcgggagtaactcaccggatgcccctggcgtctgctcctgctgcgtagtctgctgggtgacttgttgtaacgtcccctgagtactggtactcacctccgcggtcggggtagtcgcagtggtatccgccgtcgcgggtaccgcgaggaataccatcgtgaggagagtggggagaactagcctcctcacgactccttaccctccttgaggatctccagtaacctacgcatgagctccgttacctgttcgccctcaacttcgatgtgtcctctcacccgagtatcgaggactctcttctcgaactccagcgtgaaccccgagcctctaaactcgcccgatgcactgatctcgtaccgatctttctcgtcccataccctgaaactgtatgaatcaccttcgagtttggcctcggttctgaggttccggattaaattcagagctctcaacgctagctcttcggttatctggaagccgagttcggctaccttttcgggtgttaagtacttcttcgcgagcctgtcgatcaagcaccgcgacccccgcgcaacgaaatcgtcggtggtcgccgataatgtccggtactcagtacaggttgatcccagttaaaagccgttactggaaggtaggatcgggcgccgtcgagaacgcgttggaagcgttacgcgggatcgaactcaaggacggggacgtcctgctgttgtcggagaaggcggtagccgtcgccgagggcgagctcatcgacgagcgcgggtacgaaccgggtgtactggcgcgactcttggtgatactgtggatgagggtagtctggggtaggatcttggggcccctactaggccctctcatggatcccccgatgcgcagggaaacgatcgagaacctgcgtaactatccgttgaaggatggatcccggcacaagcaaatgatcctcgaggagttcggcctattgcatgctttggaacctgtgtccgaagcgggttgtgacgtcgggaacgtgccggggtattacgcggctccggtccccgagtccgcggatcgagtggcgagggaactccgcgaggaactccgccgtcggcgaggcgtcgacgtgtcggttatcgtcggtgatacggacaaaacgtatgagattctagggatactgttcactacggtggcgagggctcacccagacatcgtcacgggtacgggggtaatcggattcctggtgggcaggttactagctaagacggttggcccgacccccatcgctatagcaggggatgtttcggtgcgggaagccatcaagttactagatatggccgaagacgtgcggacgaaaggggcaggtaggacggtctatgacgccttggaagaagtgggcgatccagaatcgctggatgaagagttcctgaacggctttgagcacgtcccgatagtaatagctcgacccgttaccccgtgagcttcagcccgtatttctcgatcttctccgcgatcttcttcacggctttctcgggctcctcttcggtcttagcccccgtacatacggccttaccggagtagaacaatagcatcgccaccttgggttccctcagtctcagtaccagccctggaaactgctccggttcgtactcgatcccttcgacgtcttcgtctcccaccaagacctccgcgatcgtgtccaggtccagtggtacgtggaagtcgatcgacgctacgatgttctggatctccacttcgggttctccgtggaacttcactccgcacttcttctccaggtcttccctgaccctctcgacgctcttgtaaatctgctcccgattcttggcaccggtacacaccattttcccggatctgaagatcaataccacagtaccgatgtcttcgagcctgtatacgagtcccggaaactgttccggttcgtactccccttggagtattacggagcactcgtccaagttcacctctcctttgaggtcgacggatgctacgatgttctggatctccacttcgggttctggtacaccctcctcacgtttttccgccacgtccggttcccccctcacacggcagtgccgggacgggttccccctccaagtaccggaggcctaggaggcataggcccctagcctccaactcttcaccggcgaagatcgagacgtctccctcccaaagctccgacaccctccgttttaaaagttcgtttttaacaccacccccggagagaaccagcaagtccatgtcgtactgggccgcattgatgacgatggtctctgccacgagttctaccaaagtacggagcacgtcttcggctggtgccccggcatctcgaatgtggtctctcagaactcgctcctgttccggcggaacaggggccaagctacctcgcacacgcccgaagacgggcttcccgtcgacgtcaacacttctcaactccctccgaaagttctcgtcgacttctccctcggcagctttcttaccaccttcatcgtattccttccccaacagctcacgtgcggccaagtcgagcgggaacgtgccgacactgaccacagcatccccgaagtcgggccttccgtccctgatcggggtcactaccgccatcgctcccacgtccacatgtacgcagttcgggtactcctccgcgacgcagtacggtgcacccaccgcgtccccgtcgggtgctccccaggggtccccgtacacggccagcgtcggtacgcccgtcttctcgtggatcataggtccgagaattaatccgagttcgtcgacgatagtccccacaaccgcgaggtcagggttaacgcgtcgcacacgctctatgaccctgggggctatctcctcccgcagcgcacgtcggctctcctccagcgtgaacacgcacgagatcttgccgaaaactccctcctcccgcgctacgatctcccaatccccatcttcattcataacgcagtaatccgtccccgtgtttcccagctggatccccaacacacgcgtcaacgtcgaccccccgaccgtctcccgatgacgatttaagagcacccgggcgccggcggtgaatccggaaacggggggtactggattatgcccaagaccaagcactggcactactcaatcccgccggaggagctggacgatgaacggactgccaaagccttcatacgagagctgaggatctccccgaagcatgcacgggagatatgccgcgcaatccgcgggatgcccctagacagggccaaagagttcctacgtcgcgtgatcaggaaggaggaggccgtaccgttcaggaagcacaagaagaaggtgccgcaccgtcggcagatacggcccggatgggacgccggtcggttcccggagaaagccgcacgggagatcctccgcgtcctggagcacgcggaagctaacgccgagtacaagggattggacacagaccgcctgtacataaagcacatagcggcgcacaagggcagggtgattcgaggttggataccacgtgccttcggtcgcgcaaccccgtttaatactccgacgactcacatcgaggtgattctggaggaacgatgaggggacagtatccatggttatgtacggtgagaacgtgcccgtgcacaagaagttcgtgcagtacgggatgcttaagactgagctggatgagtacctcgaagaggagctaggccgtgccggctacggtggaatgaggctacagcgcgtgcccaacgccaccaagattatcgcctacgttgagagacccgctatcgcgatcggtcgccgtggtcgcaacattcggcgggtggaagaggaggtccaggagaggtttcctctcctaggtcgagtgtcgatcgaggtgaaggagctaccgagtccggagttgaacccacgcgtggtggccaggcgcctagcctcggcactcgagcgcggtatccacttccgccgtgccgcatacggcgcgctacgtcgcatcatgaacgccggagctaagggcgcgatgataatcctatccggtaagctcatcggtgctcgtgccaggacggagaagttcatggagggagccgtgaagtattgcggcgagccaggtgacgagtacatgatcgaaggctacgtacaggcagtgactaagcccggtgccatcggtgtgacggtccgcatcatgccgcccgatgtcgaactgccggacgagctggagatcaggccaccggaggaggtcgaggacgagctgaaggaactcatcggtaagtcagaggacgaggccgagggggcgtaagtgttgggtaagttcaagctaagaccggacgagatcagggaaatgacgcccgaggagcgacgggagaaactcaaagagctcaaggcggagctacttcgagagatgacttcgaaatcgatctcaggggtcccggacaatcctggcagggtaaaagaaataaagaagaacatcgcaaggatattgacgacagaaagagaagaagagctgcgtaagatccgtgagacggaaaagggttagaggggaactcggagtagagatgcaggaagacgacatctgcccggtttgcggtcttcccaaggaactttgcgtatgtgaggaagtttccaaggagacagttgagaagatcaaaatatacactgagcaggtccgaccaggtaaggtagtgaccatcatagagggcttagacgacgccggtatcgacttgcaagaactagccagcaagctcaagcgtgagtgtgcctgcgggggtacggccaaggagggtaagataatcctacaaggagaccaccgtaacaaggtccgagagttcttgattaagaaggaaggcttctcagaagacgccatcgaggtcacgtgatccccatcaaaaacacccttctgcccgatatctcctcggggaacgccactcctacatggacttggtacccgtgttcttccagaaacttccccctcattctacacacttcaagctggtattcgacagaactttccgccctcttgagcacctcacggactctttctataccctcatctacgccgagttcctccacgatcacgcgggggctggccctaccgtagcagcaaggtacaacgagtacgaaatgtgcgtccgagttcacggccagcttgaggagcctatccgtgagcgtaccgcacaggtgtaatcccacgatgacatcggggtcgtccgggagaccatacttcgccgtctcgtgaaggtcgttgacttcgaattccaagttgtcgagtcccactgattcaacgtagcgctcgagctccgtccaagtctcgaactccttgatgtcgaacccgagcacgtcacaggacggcgaagaaaccgccagcgccgtcgtcagtgtcccgcggccgcacccgcagtctactaccgtgtcccctggttttagccttgagcatagtagcgttagtatagtctcaacttgcttcttcttcctccatgcgtcccgaccggacctcggaaacgcacacctcggtaaatacagacagctcataccggagggggttcgataccttaactccaagtccccttcccccaccccccgaccctgaggaactagtcggtaagaagttcagagtcgtgagagcgaactcccggacctacttggggatatccggtcgcgtggtcggcttcactaagaactgcttggtctacgatgacggtggtggtgatcagaagatactccctctccgccacatcgtgatggaagtggaagggttgcgcgtggatggccgtacgttactccggctccttcaagagctttaacagttcaatcggtactgggatcactatggtgacgttctcttccgctgagacctcggagagcgtctgaagggtcctcagtaagcctgggttcactcctaagacctccgatgccttccgtagatcctgtgcggcctgtttctccgcttccgcttggatcaccctagctcgacgatcccgttcagcttccgcctgtcgggctatcgcccgtctcatctcttcgggcaatattacgtcgcggatttcgacaccggtgacgtggattccccatccctccgtcttctcgtctatgatctcccgaatacgctcgctcagctcctcccgcttcgctagaatatcgtccaagtcgacctcaccgagcaccgatctcagtgtggtttgcgccaggttgaacacggcctcttcataatcctcgacgtttagcacggcggagacgggatccactacccggtagtatatgacggcgtcgactttaatcggtacgttatccttggtgatgacttcctgagccggtatgttctgagtaacgacccgaagatccaccttgatcatcttgtcgatgaacgggacgatgaagttgagaccgggttccctagttccaatgtaccgtccaagtcgtaggagtacgcctcgctcgtattgattcactatccgaaccgaggccgccagcacgaggagggccagtactcctccgaccactagcggtatgatcaacgccgctccccggttttcctccgcttaactacgagtttattaccttttacatccagtacgaccacccgctcccctcgccgtaaccgggtcttagagacggctctccacggttctccacgtactttcaccaatagcgggtcttcccggattacgatgccttcctcccctttaagctccccgacgctcttcagaagaacgtcgctgctttcttccgttcgtctcagaaccgccgccacctgcatgaggaggacgaacgcgccgggcggaagtgtggcaatcagatatttcgttcccatcaggtacgctccgacccacgcgcatactacccctatcatggccactataccagtgttaagtacgcaatctaaaactatcagccccacgcccgcaaggaggagacagagctcttgagacaaggtgtccaccccctagaactatccctccggttatgtgatattcgagcgggggagccacgtggacgtagtgatcggtgcgggacctgccggccgcacttacgcaatgatcctcgccgaagctggacacgaagtgctgctacttgatagaaatggaaaggaaggaaccggtggcaaatgcctgaacgaggcgtgtgtcgtgctcggtgcgctgatcgaggccgctagactcgtcgtgtgggcgaagctcggtattccgggagtggagctggacgtcggggacatcaacttcagacgtctaacgcggtccgtaaggaaagtcgtagagaccatacgacaacgattgatcaaagagaccgagagagccggtgttgagattctgcgggctgaggcggtgaaggtagacgagtcgctcaacgtctacaccaaagatggtgatgttctcgaggccgatagagtgctgatagccaccggttcccgaccggcgattcccgaggtggagggggtggattcggacgccgtgtttacttttcgggaaattttggaaatggaagtgccctcagagctctgcgtcgtcggtggaggtccgacggcccttgagtccgcttttgctttcgcggctctcgggtccgaagtagttctggcgtacaggtctagaatactaccgaatgctccggaggaagtccgtcgcgagatccttaaggatttggagctcgtgggtgtcaacgccgtccgtgcgggagaactacgggcgattcgggagacttccagcggtgtggaatgtaggtttgagcgcggagctaccgtggcggacgcagttttactagccactggcctcgaacctaactccgatattgccgctaactccggactccccttacggaaggacgggtccgtcgtggtggatgatgggatgagaacaccgcgtgatggagtttacgctgcaggcgacgtgacaggacctccctatctgactcccgtcgctcggtacgagggaacggtggccgcactgaacgcgttgggcaagaacgtccgacgggggaatccgccggctcctcgcgtgatcagactcttccgagacttcggccgactggaactgagggggatcgactgggaaggctcactccctacaccggtaggtggacccgcgttctggatgcttcatcatggtatcaagggtaagatggtgtgcaggaagcgcggagttactaccgaggcgttcatcgtggcgcccagaatcgcaccgatgctcccgtacccacgctgtgtggaacctgactggcggctgatcgaggtgcatcctaccccggaccctgtgatcggcctgctcaagcagctggggctccgcaggacgcttggtgagtgaatcatctgatccgctctccgggctccacttccctcttactctcgtcgatagtcaacaatgcgggttcgtccccaacggccaggatcatcgcttccgaccgtacgccgaacatctctttgggttggatgttggctagtacaaccaccttacgtccgacgagctcctctggctcatacgtaggatacagtccggctactgctgttacggtacgatctccgatatcgatccggagcttgatgagtcgatcagagccctcgacacgttccgcttctttgatcttgcctacccgcaggtctaatcgattgaattcctcgagcgatacgtactcgtcgtcctgcccttcggactctcctgattcttccggcagtaacgccttagctttctcaaggtcctcctccgttaccttcgggaaaatgggctcgggctccggtatctccttagtctctacgtcctccaaggcttcttcccaatcgacgtcatgtacggagtcttcgtaaccaagactctgccaaatcttctccgcactatccggaaggaacggggctaacattacagctagcgctttcacaattctagcgcacccacgtagaacttcggcacaacgctctggatcttcatccttaagtttccacggctcgtgttcttggaagtactcattcccaaacttagatagacgtaatacctctgtgagcgcctccctgaatcggaacttctccagatgttccgtcacacgctggtgagtttcttttatcttatcgactatctcctggtcagtctcggcttcgggaacgtttccgtctaagaatctataaataaacgatagcgtgcgatacacaaagttacctaagttagccactaattcgttgttcacacggtcccggaagtctccccacgagaaatccgcatccctggtgagcgggctcaccactatgaggtagtatcgtagcagatccgcagggaacagcttggtgaagtctttgacccacactacccaaccacgacttgtactcatcttttctccttctaaggtcaaatactcgccagccacgatagtgtatgggagagtcgctccgacgcccatgagcatggccggccagaacagggcgtgatggactattatgtccttaccgatgaagtgaactattttcgtatcttcactaaaccagtagtctttccagtcttgacctaccctatcacagtattgtttcgtgaacgttacgtatcctataggagcatcgaaccaaacataaaacaccttatcttcgtatccttccaggggaacgggtactccccagtctagatcacgcactatatcccaatccttgagtccttcacgaacccattggatggcataattacgcacgttcttaggcagattgtcgttggactctaaccacttcttcagatcttcttcgaattcgctaagcttgaagaacaggtgcatagtgcgccggacctctggcttcgatccacagatgacacacctcggctcttcgagttgtacgggctccaggtagcgaccgcaggcctcgcaatggtcgcctcgggcaccttcagcaccgcagtaggggcatactccttcgacgtacctgtccggaaggggcctttcgcactcaggacagtagagttgttcgacctccctctcctctatgtaccccgcttcgtacaacctcttgaaaaaccattgtgtcatatccacgtggtcaggattgaactcgcggcaggtgcatgagaactcgtcgaagtggatgttcaatcgctctaagtcctctttgatcatctcgtggtatttttccacgatctcctcgggatccttcccctcgagctcggcctgtagcgctatcgggaccccgtggttgtcagtcccgccgatatgtatagcgtcgataccacgcatcttgaggaacctcgtgtacacatcggcggggaggtacgtgctcctaacgtggccgatgtggagtgggccgttggtgtacgccaaggccgtagttacgagtaccttccccaataccggctacccccaaatgcacctggctacgtccgtgaacgtcactatccgggacacgaccaccccgtggcgcctcagctgcttcaccatagaaggtacgagattcacctcacgatcgacctcggctcccagttcgacccggtagacgctccccatctttttgacgccgagaactcccaccacaccgtcagtcgacttcagggcttcggttaagtcgcggggggaaccgtacaggactcgcagctccaggatgtacccgcgaattttgcggaccctcgctttgggaacctggagtttgacaccgcgcttcgttttcacacaggccgttacgcggccgtcggtgacgcggatagaaaccgcttccactcctggaattcgcgacagttcggcgcgtacctccgcggggtccccgttcgacacgtcgacccggtagtaatcgtgctccgatgccagccctagtgtggagcgcagcggttccgctacggggaggtggggcacgagcatgccgagtaggcacaacgataccgccagtgtgctccttcgggtgatcctgtcgaccgtggacgggagcagagaggataggaaagccgtccagaggtacgtcaacgtatgatacgccggtaagtagaacaggacttggcggaacgcgtccagacctcctaacaccccgagcgaggctatcggtggggcgacggttctaatcctcgaagctaggagtatcgacaggcccacgacggacgggttcgccagcggtccgccgtccaagcaccctaggcagagcagggacccggcgatcgacaagacgatggccttctcggtccggtcggctcgtaaaggtactatccacgccagtacgacgtaagctatcgccagcagggcgagtactgggagtggtacccacggtggtagcacgaacgacaggggtacgccgcagtggaattcgatcttaggctcaccgaatattgccgaaatcagcgctccgagacacgctttcacggcgtgacagtggtaaaaggaggacgtctctggacgctccgtcagcgtgactatacaggtacctaagcccgggttgaacccggcttcatatatcatcagtagctggagcgccggaggcaccgctaggatggctgccatcagcgcgtacgtcacccacgtatcgattttcgggaggggaatgcgtgaacggtacgggagcacgaggaaaagcaggccgaggtgtaggaggagcataacgtccttggcttcggttgaccccaatatcatcgggtagagcgcatcgtgtatcctccacttgatctcggagtcggagatcagaactacggcggccagtgtgaaacacacggctgataatagaatcggcccacggactctcaccgtcggtttgcccgtcgtcccgtctttccctatcgcctattaacgttccctggtcatagaacgtatccccacttcaccggcgtcacgttggcgacccccacaggcttcagacctgctagcttcagtgcgccggtaaccgagtaagccaccgggtactcctcctctaacgaggcgacctcgaatacgtacaccgacccgcggcgctccactttgaatatggcgagaatcgtcggggcactcgccaccttgcgtgcagctacacttgccgggatcttcggatcctctacggcgacttcaaccacataagcgttcacggagttcaagaacactgccggagcttttccgagtcccgctttccttaacgcctgactcagttcctgcgctatatcgtacttcgacaccggagtgggcgccttcactatgatgtacgcgtcacacgatgaaggtgctgtcctgatccctcccaccctgatcacgtaaggacacttgagcagtgcccgcttgacatcccctggctccaccgatcccttgacgttcgtgatcgctacgtgataacacccgactctggctccctttgaagagatcgaccactggtaagttatcactcccatcaacgcaccgataaagatcgccgagatgagcaggacggctacgatcttagtcctcaacactaccacccctgtcccctggcgatcgcggtcatcaggaggagggccaccgcccatactacggagttaggagctaacggggacgtcaggtaccagaccacacggatcgtcgcctgaaggagcatcggtgtcaggccgatgagaacggcgatgatcacgtatcgtcgtacgggaagcggtcctaacgcccacacgatgagcatccctagtccgataaccatcggtttacacatgaacccaccatctacggctccgagcactacgagaaatcccgcccatgatagcagtagcgattcggctgcactcccgcgctcgtggaacacggctaatggtgacaggatggctaagatcacgtaggatgcgattacggcggcagtgaagatcacggcggcccacgtgggcatgaacttggacaaaacggatccataatggtacttagtcggaatcggacctataacgtagttcatgaccttccctacgcacgccttgagggagtgggtgtgagtcagcgaggaggtctcaccgaccgacgaccccccggacacgacgaccaaagtgccagctttcaggccgtacggggtgttgtattgcagtatcatctgagccaggtaggggctcgtaaggatcaggagcgcgaggcataatatcaatctccccgaagcgaggacctcgatccatcggctcggtatcgaaggggatgaccagagcaataggcacatcagcccgaggtgggctagtagtatagctggtttggcctccgtggatcccgttaaaagtgggtagaaaaacttcctgaaaatcccgtcgagaggcgtatcggccagaataagggtggcagagatcgagagtaacacgagcgatgcagcgaagtagagattacccgacttcgaggatctcttcgacgatctccgcgacggcgcttcgcccccttcttatgagccactctccacgtggcttgcgggccatctggacggcgtcctccgcaccggagctttcgcttaagtacattaccggtacgccggactcttcggcgatccaatggctcaggtgtttgggatgcacttccgacaccttcacggccttcttcgccaccacacaggcttctatcgtgaccccgaaccctccggcgaacactaccgtatcggccagcatcattactccgggtaaatccacgaattcccgaacgcactcgaagccctctggagggcttaccctgaacggcaccaccacaggatcgtggtcctcgagatcggagagcagtcgtcgggctccttcctccgtgatgtcgccacccaaacataccagtacgcgaccttcgtactcttccggtacgggtcccggaatacgaccggataggtggcggtccgctaggtactgggccaacggtgccccggaaaccaccttagtctcaactcccacccgtcgtttgagtacctccgcccacttctccgagaacggcaccagcacacgcgtcgcccatcggacggcttccacggggttgtacacgtccatctctaagtgtacggaggggatccctagcatccgagatgctatcagagacttcctggcgtccccggtgttaccggatgaaagtaccacggaagcacgctccgacgccaaagcccgtaccgtccgtattaagtcaacggagaaccctacgtacccaagtaatccttgtctccgtcggggctttcctaactgcttcgtctcgataccttcccatttcagtatctcgactccacgcccgtgtccgtatactgttacttcccacccttcctccaggagtcgctcccacaccgggaggaggttcttggccggggacggttctacgagactgaaagctttcatccgctcacccgcgtcggagcgttcccttagtggatggcactccgtcaccgacgatttccttcgctgcgccgagtgcgcggcctacggccttaaacatggcttcgatggcgtgatggtcgttgtcccaccaccgtaccaccacatgcatggttacgccggcgtggtcgcagaagcttttccagaagtgcgagacgttctccgtggataatggaggagaaccgattctattgcgtcggggtcggtacccctttaagacgaagtaaggccttccggagatatctacagcacattctactagcgcttcatccataggtaccagtgcccatgcgatccgtcggataccctcgcgatctccgagtgcttcgttcaaggctttacccaggcatataccgacgtcctcgacggtgtgatgatcgtcgacctctaggtcgcctcgggctttgatctcaacatctatacgtccgtgaaaggcgaactggtgcaggaggtggtcgaaaaacggaagaccggtgtcgaccttagcgcgaccggatccgtctaggttcacgctcacctcaacttccgtttccttcgtcgtacgcttgacatccgccgtccgcaccgagttcaccccatcgcaaacgtcggttggtggcggtaaatagcacggacgtgcggcccgatctagggtccccatggagaggacggtttccatcgtctgcatcgtcctaggtgccgcgttactttggatgtcttccggtgcttctcatcaggtggtcggggcgagagagttgcagtcgaccgatgacggaacattagtaagggtcaaaggcgaggtgctgcaggtgaacgtagtgagcgacggcgcggaagttgtcgttctagacgcgggggacgggacggtgaccgtgttcctcagtagggaagccgcaagtactttggccccgactcctggggaatcgctggaagtggtaggaagagttgaagagtatcgagggcggaaggaagtccgtgtggattcgccggtacgtgcccgctaaggctctcatcgtcgtgatcatcacgacgttaacggtcccgtatttcgtgttctacggtaagccgcgcggtcccgggtaccctacggagctgtacggataccggatcgtactggaagatccggcgctcgcggtagtggacgtggaacccagacggaccctgctgttcagacacacgcttacggtgtccgatgaaggttggtccgtacatcctgtcttcgatatacctcccctgatattcgtgcgcgcggagcgcatggatactcttgaaacggttaagaggaacttgtgggcggttgtactacaggagggagctggacgggtgttcatgcccgacgagttcgttgagggtggcgttccgggactcatcacaggcatcgccggccaggcttgggcctggaaacatctgaaatgggccagagagttcggagttattcacgggctacgtcggtacgctaaggaggtcggacccgagcgcatttccactgccatcttagaggagtataggagagcaccgtggcgggcgatcctagatttctgtgacatgatgaagaacagtgacgtagggaggttcctgcgctcacgtgggctttccttccgggatttcctcaccagtaaagatccgaaactagtagcggaggtcctagtcgtgttggacctgggaaggctcgacgagcgagtagtcgatgaaagaatacggtacgtgttggatgcgagggcttaccccatccccgagtcggaagaaaagatcgtggataaggcggcgcgtgagctgcttcgtcatggatgaagctcgatcccgagggcttcacagatctccttgtaccggtttcggatcgtaacttccgtaactcgagcaacctccgcaatctccttctgagtacgtctctctccctcgaggatggacgcgatgtataatgcggccgcggctacgccggctggccccttacccacggtgatgcctttctccttggccttttcgatgatctcttgagccttagcctggacgttttcggagacccctaacttcgaggcgaacctgggtaggtgatcggagggttcagtcggtttctgcttcaggttcagccgacgttgcagtactcgataagcccggagtatctcgttctcatccgagactccgagcgcctccgcgatctcgcgggcagtccggggcacgcgagcttctttacacgcggcgaataccgccgctcccaaaacgctctctatgccgcggccacgcacgatcccttctttgtacgccttcctgtatatcgaggcggcgagttccctgaccgactcgggtaactgaagcttggacgcgagattctccagctccaggaacgcctggaaaaagttcctttcccgacttcccgatactttgatacgtgcatcccaggtgcgaatgcgccgcatccgggggttctttttcccaccggagtcgcgcaactcccggtctataatcgtggagatgcccttatccggcaacctcagcttgacgggctctccagttcgagacctccgttgtctctggtccgggttaaagtgccgccactcagggccgggatctatcaccgggtcttccgtgaccagtccgcaattcgcgcagacgtactcaccccgctcctcatcgaaaacaatctctgcggaaccacacgccggacattcctccgtgaacttcccggtgttcctttcagaagcagccattctcgatacaccccatcatctgcggcggcggggccgaccccgccgcctgcgaggaggacgccttcgccgtcgtctgggtggtatgaagagctccttcccgacgaacctctcgaggtggtggcgggacttatctcggatggccacgtagggcttatccgcgggcccaaaaacgtccacaataacacctacacgctcacgacggcgagttacaacgggcgcccctaacggcggtacgtgatcggcccttgcgatcagatttccccggggcgtaacgtggagggcgcgccccagcctgcgcatgacgacaccgcctgtgtgtcattgttcaactcgaaggttttattgtttttggcactctagagcccacgactcagacttcacctgttggcacattccgagcacacatcgagtttcttgttgctcttgaacttcttcccacacaccttacacgtacactcgtacagctttgctcgcttaccctcgagctcggcttccctcttgatccggcatgtcctctccagctctcgacggaggtagaaccaggtatcaccgaacacatccctgccacgcattactactctcctggcgacctcgagtccatcgccgtctccatgcatagcacgtaccatggcactcaagaactggcgctctcggtacctgtaaaggtctatagcgtcgttggggcagacgcgcacgcactcatcgcaagcgtcgcaggcctccaggtccgcgatgaccacctcttcgcccttgattttcaacactcctctctcacaaacttccacacagagcgcacaggaggctccctcacatctggtccggtcgatctcgatccgacggactacctgcaccgaggctcccccggggaggatcggagttggacgtacgggttcgagaggatgacggcgacgtgatcttagagttctatgcggaggatggcaagtcggtcgaagtttcaacgcgtgcgttctacacggcagtatacctgaaccgtcaggaccctatcgagaaaacgaaggagttgttcattaaggtctcgaggatcctcggcgaggagcaacccgagatctcggtgcggcgagaggaggacccttcgggtcacatcctgaacccgtgggtggctaactcggagggtgctgacgacgtatggccgctggtgttcgaggtgagatcgaaggacggagtggcacgggagttcacgttacttgttcccgtgaggttagagcgtcgacgactcagggagatacttttaaaagttttcagatcttgatcgtcgggtttccacggaggtgatatcatcttgtacccgagaggaagggaggctaccctcgcggccgtcttgcataccatactgcgggaccgtccctcgacacagaaagagatcgcagagaaggttggcgtttcccgacgatacgtgacggaactcctaaggccgctcatcgaggagggcgccgttcgaaggacgtataccgtcgacatgtcgaagctcagacgccatttccccgaattattcgaggagcttggaaacttcctgtacgaagatgtggagatgcacttagagggcgtccgaccttacttcaaacgcatgaccgacctgaccctcgagcagatcgagacggctcttatcgcggtcgaggagaacccggaacaggcccccaaagttatcgagatggacgaggaagtgaaccggttggacgaggaaatacgtctctacgtccggacgcttccagtcctccatccttgtgaagaagccggcaaggtggcgaccctactgctggagatctcgcactgcatcgagcggataggggactacgcgtgcaacatcgcggaggtggcggaaacactcgggacactgtccgacctgcaatgctggagggaagtgcgggaggccgccctggaagcccgtagcatggtgaaaaccgcctacagcattttcctcggtcgggtgaaggaggaggacctgcgccatgaagccgaaaaggtgtactgcgccgaagatcgtgtccacaaaaacataattagggcgtgtgagaaggccgtcgaggaaacgaaagagtttcctgaaaaggccgaccgactgttcggtctctctcggatcacgaaggacatcgagcgtatcgcggataaggctgtagacgttgtagatttcacgcgcgagctcgtagagggtaggccccgggatctcacacctgagcaggagatgaggagcaccctacccgctgacggcactcattaggggggtgccggttgtactacatcgggctcggtggcttcggctgtcggttctccactcacgcctcaaacgcaggcctcgaggtgatcctctgcgcgggatccagaggagacctactgcgggtgtcggaaggcgagaaaatcgaggtggccagcggtatcgggttcagtcgggactggcgtaaggcttccgaggagctgcaagagcaagcggagactatccgtgagacgttagaaagggtgggcgccgaggaacccacggtcctcgctttcggtctcggtggagccgtcggatacgctttagcgcagcagattctgaaggagcctccggtgcctttcatcgtactgaccacggttccgggagaatcggaggatcctcaggtgcgtcgcaacgctgctgaacaggtgaagagcgtcctgggagtgtccatcaagcttcccgtcctctgggtggacaacgcgttaggtgggtatgaacgggttaacagggtactcgagaggacactcctcgacctccgagacttcctgggcgtgcccgtggaggagctcccgaacttggccggtaactacgcgttgtcaccttcgatatccggagagaaggtgaccggggacgtcgtcaagacatcggcggatgaggtcaggaagctggtgaagagtagggagccagaggaacacgtggttcgacgcgagcgccgtgggcctgacccggagtcgctgagagaattgttctaagggggaaccgctatggcgaggaaagctagagtgacgctcacactctccgaggacgccttggcccgggtcctagcgaccaaagacgccctcgagggagacagtatctcggctaccgtcggtaagttggtgaagttcgggttcgcgtacctcagggagaagttccccgaactgttcgagggtataaatctcgaggagtaccgtgagaaggcgcgtgagcgctggttcgattccggatcctctcggtcatagtttttaaactcgggtcaggggcccctccagggaaccgcgttgcgggcacctgaaggcttccttctaggtggcatcaaacgcgaaggtataggagtcgggttgatcttctcggagcgtcgatgtgccgtggcgggcactttcaccgagaacaccctccgcgccgctccggtggagcactccgaggaagtgtgcgatcgaggtgtcgcccgcggagtgatagtgaacagtggtcacgccaacgcgatgacgggtgaggaggggtatcaggacgtactgcgcacggcggaagcgatcgctgagctaatgggggctccggaggacgagatagtggtgtgttctacgggcgtgatcggtgagcgtcctcctgtcgacaagatcgtgaggtacgcgcgcgaagtttgggaggatataggacccaccgaacggcacgttcgggagtttagtcgggctatcatgaccaccgataccgaggagaaaatagctttgtacgaaggcgatggctggtcacttctcggaatcgcgaagggtgcgggtatgatacatccgaacatgtccactatgctcgcgttcttgctcaccgatgtaggagcgaaaccgaaagagcttcagatgtggctacgcgatgtcgtgaacgacacgttcaacatgataacggtagatggggatgaaagcactaacgattccgtggtgctgctggcgaacggcagctcgaacctcaaagtcggcagcgatgttaccatcacggagttccagcgcgccctggaagaggtctgtacggagctcgctgagaagatcgtacgagacggtgaaggagcgacgaagctcatgatagtgtgtgtacacggtgcgagtaatgaagtagaagctcggcgtgcggcccgtgcgatagcgtcctcaaacctggtgaaggcggcgctgttcggcgagaatccgaactggggccggatcggagccgctgtcggggccgcacgcgtcgatgttgatccggacgagttacggatagctttccgcagctcagagggcgagatagtgacctacgaaggaggtccagtggacttcgacgaagagaaggctaagcgcgttctctccgcgagtgaagtcgagattgtggtggacttaggcgtaggtgacgcgtccgcccgcgcgtgggggtgcgacttaacgtacgagtacgtacggatcaacgcggagtacaggacttgaccctccccgccttaaaggatgattcggggcgtcggccctctgttcagtcacatctttcactgggcgggcagtcgagccgttcagaatgcatttcgggagcaaatagcgggtgggttcggggcgatttctacggatcgccgatcgcccgtggtaacccaagaataaaaactctcccatcctttcaaccttggaggatgaggctagcagcgtgagggggcctcacttgaccgacagggaggaagtggtagaactccgcggtcatattatcgactcactcattttctcccgggtactggacactatcatggagatgggcggagattttgaaatattggaattcaaggtagggaagcgtaaaacggaccctagtttcgcgaagatcctcgtcaaggggaaggatcctgagcatcttagagagatagtctccgaactacgcaagtacggggcggtccccgttcacacgcaggaagtccgactggagccggctccggcggacggcgtctgtccccggggcttctacacaactacgaaccaccgaacgttcgtacttttcgacggcgagtggatcgaggtcgaggacatagagatggactgcgcgatcgtggtttacccggaggaacgcagggcagtggctaaacccatccgagaggttcgtgagggagagttggtggtagtgggagacagaggagtgcgcgtgaagccccccgagagaccccgcggtaggactggaatcttcggcttcatggagagcgaagtctcacctgaaaagcccacaccaacgctgatccgaagaatagctgaagaactagagtggcaccgaaagaacggtaaaatcgtggtagtcgttggccctgccgtgattcacgctggagcccgtgatgatctggcatggatgatcagagaggggtacgtagacgtactcttcgcgggtaatgccgtggctacgcacgacgttgaagctagtttattcgggacgtcactcggtgtggatttggagacgggtgagccagtaaaaggaggacacagccaccacctttacgccatcaacgagatccggcgagtgggcgggttacgcgaagccgtcgagaaaggaatcctgaaagatgggataatgtacgagtgcatcgtcaacgatgttccgtacgtgttggcaggctcgatacgtgatgatggtcctatcccggacgtaatcaccgacgtcatggaagcccaagcggagatgcgacgtcatctcaagggggccaccctagtgctgatgatggcgacgatgcttcactcgatcgccaccggcaacctcttgccttcctgggtcaagactatctgcgtagatatcaacccggcggtagttacgaagttgatggatcgagggaccgcccaggctctgggaatagtgtccgacgtcggtgtattcctaccggaactcgtgaaggagctcaagagggtccgcgacgacgaggcttagtccactcttccaccctgcgctcgatgagttcttccatcacctttttagcctcttccagcgcatccttcgtccccctgaaggctaggaccgttgtcttcgtcccgccccgttcaatctcccgttgcacgacttttacgtcgcaccttcgttccacctcggcgatcacgtccgcggggacgcccagtggtattatcatatcatacttcttggtatctcgttcggacaccttcgacacccccagagggggatgaccgttgtcggaaaaaagtagccggaaggagcgagatgagaagacggagaaagagaccgccagacagggaaagcaccgccgcatcagggtcaagtctaggcactacgaaatgccgttttcccgaggcgttctcgccagatccctcacagcgatcggcgtcgagcctcacaaagcgtacgagattgcactcaagatcaaagaagagctgcaagatgaaggtatagaggaaattagcactgatgaattggcggatataatccggactaaacttgaggaaatcgatgagacactagcggaacgatatgagctatggaggaggattaagaagcgcgaggagccgataatagtcttaattggaggagcttctggtgtcggtacatctacgatagcctctgaggtaggacacaggctcggtattacgaacgtcatcggtaccgacgctattagagaagtaatgcgcagagttttagccgaggagttgtatccgactctctatgagtcttcgtacacagcttggaagcgattgcgctatgaacccgccgaagaccctgtgattactgggtttcttgaccactctgaaccagtggtggtcggtattgagggagttgtgaatcgatcgatcaatgaaggtatccacgtgatcgtagagggcgttcatatcgttccacgattgattaagaaggagattctcaactacccaaacgtgttcgtgttcatgctcgctgtagaggacgaagaggcgcataagtggcgcttctacgccaggtccagggataccaaactctcacgacccgccgagcggtacttgaagtacttcgaggagatccgtagaatccacgacttcctcgtggaggacgccgaagaacacgatatcccggtgatcaacaacgaacatatcgatgaaacggtggaccagatcgtgagctacatatcctctaaactcctgaagggtgagagagagctatccaagagcgtctcctggtggtgatgtatcttgacgttccgcgagaagttacgcggttgtaaggtcgaggaactgatgaccaaagaccctatcaccgcgtctcctcaagttggagtgatagaagcgttcgagatcatgctcaagcatgatgttggagcactgccggtagtggacgatgaggggagacttatagggctcgtaacccgaaccgacctcgggcgcgcactactcgaagacgagtacgagcccggaaccaccgtcgaagaggtgatggaaagggacgtggtagtagttcacccggatgacaccttactcgaggccttgaaacgcatgacctccgcccctgagggtatctataaccagcttcccgtagtcgacgatgaagagaagctggtgggaatactgacggacggggacatccttcggtggatagcgaagaaactgtgagggtcagagcgcgggaagcgccggaggaattactttcgctgttacgtaagctcgggctctcaatcgcccggaccaagagcggctacgaggttaggggccccaaatctcggtttctgagggcccttcaacatataccgcccaagatggctattctggcccgcgagaccgtcgaagaattaagacgggcagtcggggtggaaaggcccaggttatcctatcgccgttagaacactatgtacttgccacgcagtatatctcggtctaccacgtatatgcgctgcttaccgcctgagtttgatatccatagtgccaaggttaaatgtttagattttgcatgttctggtaataccagcaccatggccattctatctccgaagtttacggttcgatcgccaactttctccttcccgggtcctagaagggttagctttgcggttcctagtcgggcaatcaactgctcgattacgaggcaacctctggcacccgtggagtgtaaggcgcgctcgatgcgttcttctatgagcgtatgtttgccatcacttacgttgcacagtacctctccgacaactgcgttgtaacgcactttcagcttcggtccatccatcaaccgattaccaagctcacggcgtatcgcccgcttgatggcgttaacgtcgggctttccgtcgtacgatgcttggaacacgaacttggaccctttaatcacggtacccctggcgtccagtaccttatccttcaaccgctcctcgattcgttttttcacgtcttccgggtccgcagtcaacgggactagagcgtccacgacgaagaccgtgtatcccttgatcttgactttcctgacgtctacgttctccacaccacccgcactgcttacggcactcttcacgtcggatgtcttaacaccgggcttgggcacggctaggtatcggacgaccgacacctggtaatccttcactatgctcgcatcgaccgtcccttcggccgccgctacggcactctgtccccccatcatgaaggagggaatcgcggatagcaccatcatggctgcgagaaagattattccggcggtgacgatggattttcggtgtcttcgaatccagccgaacaacgatcactccccctggtcgagcagcatctccaagtacgagtgacgtactcgcttaccctcgactctcagctcctccaagatacttaccagcagcttctctttctcatcgacctccgactcatcgtccgccttacactccagctcgagaaacgtgccgagaccctccacctcatccagcgccgctacaactttttctccgttcacttcgagcgtgtagaccgtcctaagcttctttacttccgcgtgctctagcggctcgaaccctaggtggcgcaggatggcgtcggttgtctcgaaatcgtcgactaccacttctaactccacccgtgacttctcgcgccctaccttcggtcccttgtaagttagtgcgactttatcgtcggagcagcgcagtcgaagtgcttcgtccgtctccgcgaagtcacggcaaggatgctggtaatacaggtcccgctgtcggacggtccttaccttctctccgagctcctccaagcgcttccgcacgtcttcggggttcttcagcttgaccttaacctctacctcgtacacaccggatcacctcctcttcagttcgatgactacctcgggtttcaagagctgataccccaggatcgctcccaaagcggccgggacggcgcagtcgatgccgaacagctcgatgaccagcacagcggacgagatcggagcgttgaacgtcgcagccaagaacgcagcgatagccgtcgcggttccggccggagcggacgggcccaacgtttgacccagaaaagacccaaaaacgcgcccacgcacactgtcggtgaaaccaagcccgcgggtgtttcactaccgactgttagcgcggtggctaccattttgcccaggaacgatagtagcgcttcttcggctccgatgcggcctaaggcggccttcgaggcgtagtccaaccccaatcctacggctgtcggaatagcgatgcctaccgacgctaccccgagtcctgctaggagagaacgtacgggttgactaggtacggattcgacgaacagacgacgggcttccttgacgcaccggctgtacacgtatgcgagtaacgtcgccactacggcgatcaccaggagttccggcaggtgctgtgggctgtagtgataaggggcgttcctcacgagcaagtagcgctttcctaaggtcgaaacgtacacggagtatccggcaagactggctatcgtgctgggaaaaagtacgacgtagcgggacctcacgcgaaggacctcgatggcgaacagggccgccgccagcggtgcgcacagaaccccggccacgcctcccgaaattacccccagcacggcccattttctttccatctccgacattcccagcttcgaagctacgtagccccctacggacgcgcacgcctgggcacaaggtcctacttgaccgccactacctcccccgccgatgacgagacccgcgagtaccaacttcgccatccctctgatgggattcgcgggctcgtttgggaacccccggacgatgatctccatcccggtccctcggagctcgggatgtagtgccgctaggctgccggccagcagcatgaacgccgggataactaacggctcgttcccgacggccttctccaccgtgcttataattgaggagatggcgacagcacacgctccgccgacaacgcccaacgccgcggccaaaaccgtccaccgggcgacgtgaatcaacgcccccgtcgacggcaactctccacctccgggggttctcggcggtgtggaccctgacggtaagtgctgagggggaacgcggaccgtgcggacgcgtgcgagagttgtactcaaatgacaaggtctccgtggcagaagtgagtgttcggggtgaaggcgaagagcattaccaccgacgcacgttcgaggtgtactacgtgatcgacggtcgtggaaaagtggtgctgaacggtcgtcccgtcgacgtgggaccgggggacgtcgtcgccatcgaaccggggacaaggcataaggtgatcggcaacctgaggatgctggtggtgtgcatccccccgttcgacccggaggatgtgtaccgggtatgatgagctaagcctacgccgacctagtggggagtgaggatacgggtgagctgcctgacccaccccgcgtgtttatcgaactgaggttaagagttcccgaagaggtactatcggccctggatccggattccgataagtgttgcgacagaagtggggacgttgtcgaggtattcgtcgaagggttcggggcggcgaaatacgccgtcgaggacgttctgcggtgcgtaaaagtgggcaccgacacgctcgaaaccgtcagggggagcgagagtgcagccactgacgaggaggaacaaggacgagcatcccgcggttctcgacccggatcgaacgatcgtcctaggtgacgtgacggtgtcccgagacgcggtgataggaccggaggtcagactgggaccggacgccgtcgtacgaggcgctgtgatatccggacgttgtgtcgtctacaattgtgagctcggacgttgtgccgtaggtcctaaaaccacggtcacgggtgatgttggggacggagttaccatccactcgggtacgattctagggcagctccgtgtgagcggggagatcgaaccacccgaggtaggtgagggggccttcttgggacctggggtttccgttcttccggggacggtcataggtccggagtccgtcgtgatgcccgatagtgtggtgaccgagcgcgtaccgcgtcgcggagtcgtcagcggaaatccggcgatgcccacggggatggtcgtcgacgcggagacgttgatcctggagttcgatggaaagcggctgttactcgaagggaaacggggaaccgccttcgacgtcaggctgagcgacggcgaactcgaaatcaccgaagagagccccgataacttcggagccgtgcttgagaaggacgtagtgaaggtggttcgcatgggacacgcgatacccttgcccgctgagcgacctttctccatccccctgcacgtactggaggtacgaacgaaggggtaagtgggcggtgccggtccgcgagtcactactgatagacaccgatgtgcgccgctcgctagtgctcgggtccgtattggagatgtgcgaggtggaaagagcagccgtgttgggtactgttgcccagggtaagcggttcgaacacggtgttttcgtggccgggaagcgggtaccaggcgaggtaatcacggtagaggtggaagtctcaagggaagtcgtacgctcgggatcgatggaaatcgacctcgatcccgcggatccggatctggtggcggtggttgcggatgtgagggctactggactcatcgcgaacctcaccggcttacgaccggagcgccgaggattccacgccctgttcgctttctcgggtgagttacccgctcgagtacggaagagggtggtaagcaacctggacgtgttcagagaatgttgtccgtgtgccctattggagatcggtgacgtgaagctgaggtttctaggaggtcgacaggtgttcgatgaaaggtccagactgtcgtatacggacgtcctcgccgtcagggacgggaagccgatagcatctgcatggaggccggcgtccagaagcgtcatctctaagttgggggccaggtgagggaccgtggtggggacagtcagagagcttccgacgctgttttgcgagtcggtcgcactggaggtactctccgggccgaaaccagggttggtggatcccatctctcctagctcccacgaggacatggggccccgtgagttcctcgcgtgccttccggagcttcgaaggtgtctcgaggaggccctagagctggggatagacggtgaacccgtagacgagttgatccggtcccttcccgcgtggaacgtggacgtgataacagcttctggcggacctaactccgtgcgtgggatagtgttcctcgggtcagtgtactgctactcggctgggctcgaaaacgacccgttcccgttcggccgcatccgcgtcgtcgggagaaggtgtacggaggccctctggaaccggtcggaaaccaagtgcgggcgaatccggatcaaggagcgattggccggtgtcttcggcgaggtggcctccggaatggctacggctcggggggtatccttgccggtcctacgggccacgctgcgggcgggaaggcccctcgaagaggccgtgatacactcggtactggcctgcatgtcaacgttagaagacgccgggatcccccggaaactgcgtaattgggtgaaacgaagggcgtcggaagttctacgcgctggaggcccgttcaccgaacggggtcgcgcggagctgcacaaattcgtgcacgagtgcgccgaacgtggggtgagtcccggtgcctcggccgacgtcacggtcgttggactcgtcctcctacttgcgaggtgggggagggacatcgtatccccgtatcgtgatcctccgcggaggtggagtggcggagctgttgaacggaactctcaggcttctgatacggtcggacggaacccgggcggtcgcgtccgcgggagacgagaagttcttaaaggctgacgaagctgaggtccgcagggagttaacacccttcgaagcttaccggaagatatgcaagaaactggacgcgtctgttgtcgagccacccgaagatgtaggacatcccgtcgatcctgaggtgggatatcgggtcctggaactcttggagagcctgtgggactcggggttcaggcgcttgggtgtcttggggaccgtcgggtgcggtgcgcccctccacgacatcgaggtcgggaatccggtcgggtggactagcgttcgggtctcgaacccaggctcagatctcgacctcgtggccccccaccgagattacttattggagatgtcactgtctggtttcgaaactgtaaagcgtttcgcggaccgtgtgataatgtctcccgcggcattcactgggtttacagttcccagagtcgaagtccggttacccagggggtgttaacttgacggaaaaacttgacagtgtgttacccaaaacctcacaaggttcgaacttgaacgatctgaagaacctccgcgatgcgctggataagttttccgagatcgagccggatctggacgtcgagtcgctgaaagctacgctggacgatctgatcacgctcatggaagaaacaggcgtgaaagacgtgagggatctctgcgagaagtttctggacttcaagcgtgaaaaggagcggttggaagagctcctcaaggagtacttcaagcggttggaggagttggagcggaagctgcgagcccacgaggagaagcttcgcatcgaggcccgtcgtcgtaagactctggagaaggagttggagatggagcgcgacgagaaggccgagctgcgggaggagctacggcgtaaagaagtcatgatcgagaagctccgtagcgacctgcagcggatgaagaagcccccgctcatcgtgggtaccgtcgaagagatcctcgacgacggtcgcgtgatagtgaagagttccacgggtccgaagttcgtctcgaacgtgagcccgaccgtagacagaaacgagctcgagccgggtgctaacgtggccctcaaccagcagagcatggccgtggtggacgtgttaccgtcggagaaagactcacgtgtactggcgatggaggtggacgagtcacccgatgtgtcgtacgacgatatcggcggtctggacgagcagatccgcgagatccgagaagtcgtggagaagccgctcaaggagcccgagctgttcgagaaggtcggtgtcgaaccgccgaagggtgtcctactgtacggtccaccgggcaccggtaagaccctgctggccaaagccgtggcgaaccacgccgacgccaccttcatccggctcgccgcgccggaattggtccagaagttcatcggcgaaggtgctagactggtgcgggagctgttcgaactcgcacgcgagaaggctccgagtattatcttcatcgacgagatcgacgcgatcggtgcccggcgaatgcgggacgcgacgagcggagaccgcgaggtccagcgcacgctcacccagctgctcgcggagatggacggcttcgatccgctcgacgacatcaaggtcatcgcggccacgaaccggaaggacatcctggacccggccttgctgcgaccgggtcggttcgacaggcacattaagatcccgctaccggacgaggagggccggtacgagatcttcaagatccacacgcgcgacatgaacttggccgaggacgtcgatctccagaagctggcgaagatcaccgagggtgcctcaggtgcggacatcaaggccatatgtaccgaggctggtatgatggctatacgcgaggaccgtgacattgtcaccatggatgacttcctgaaggccgtggacagggtcatgggtaagaaggaagaagagagcggagagttcaagcgcgcgtaccactgatgcggactccccgaccttccaccaacaatcccctccccaggatgacgaggcggttgctggcggacccgacagggatgatgaatagtgggcgagcggactgttgcgcattacggtccttacgtcgttaaggagatcagaacgaaccaggacaacctggacgcgatccgttcgttactgaagtccgccgagcgccgtggtcctggaaacgtgggagaagtggttcctctcgatgtcttcgacacggaccgtgggctagcctccgatcgcaccaggctgctggtggctctacgggaggacgagatcgtcgcttgcgtcgccgcggatcctcgggaacgcataggttccggtcccaatccccacaacgtcttcggcctcgtagtgtctccggaggtgcgcgccaggtaccagttgggacacgtcatgatcgccgccgccctgaaaacgctccgggaagaaggtctgaaggtcgcacgaaccactccaatcagacgcgccttaccgttcttcacgggtatccgcgccgatcccactcatgtgtaccgggaactcgaggtgaggctaaggtggtatcgtaggactgggagtgaggagtacttggagctaaccagggtaccgagagaggtccgtgaagagctggagctacttcgaattcgtacggtgaacgctcggagggaccctacaccgtttcaccggttggatccggagaagcccgtgcacgttttcaggtcgggtgtccgctcgttcaccctcatagcatcgctgggggacggggatcatggtcgacgtcagcgtgatattgcccacgtacaacgagcgcgagaaccttccaagggtgattcccaagatcgaggaggtagtggaggaagaaggctggaccgctgagattctggtagtcgacgacaactcacccgacggaacggcggaagtggcccgagaactttccagacagtacggtaacatcaaggtgatcgtgcgcgaggagaagccgggattaggtctagcgtacaggagagggttccgcgaggctaggggcgaggtgatagtatgtatggacgccgacggtcaacacccaccagagtgtcttcctaacatcgtgaatccggtactcgatggggagtgcgacttcggattagggtccaggtacgtcgaagggtccgtcgttgagaacttcccgtggtaccgtaagctgaactcttggggtgcacgcgttgttgcacgcttgttcctcaaacttccgtaccgcgatccgacgagcgggttccgtgctatttcccggaagatactgaccgagagccgaccgttcgtgtccgaaggtttcgagatacaggtcgagacgctcgcgaaggcccaccacatgggctacaccgtgcaggagtacccgttcttgttccgacccagagagcggggatcctctaacgtgaatatccgtcagatactacggtacctcagaggagtgtggaggatcaggaaggacttgaagcagcgtgggctcctgtaaacgttttcacatacctgctccggatggctcgagggcagaagattgcgcgttgtggtggtaggaggcggagccgccggcgtcgtagccgctcggactgcccgggaacacggcgccgacgtggttctaatctcggcggatgagcatatcgcgtactccccctgcgccatcccgttcgtaatctcaggggagatagaacgaccggaagatatcctgatgcgcgatcccacccactacgagcgcctcgggatcgacgtcaggctgggcgtgagggtggaggaagtcgatcccgaagagaaggtcgtgaccaccgaagacggtgacaccgtcgaatacgactcgatggttctcgctaccggtggagagcctctagttcccccgatcgagggttccgaactggacggcgtcttcaccgttcggcggttttcggatatcgagcctctactacgagccgttcaggagtcggagcgagctgtgatagtgggagcaggacccatcggtgtagagatggcgtacgcccttcacgaacgcgggttagaggtcacgctggtcgaaatgctcgatagggttcttccgcagttcctcgacgatgatgtcgccgcgatagtgcaagagcggatggaaaaggagggcgtcagagtacttctcggctcgcctgtggaggctatagaaggcgatgatagagtggaggccgtggtggtaaacggtgaagagatagaggccgacctcgtcgtgatggcggccggtgtgaggccggtaacggacctctttgagagcataggggcttcggtcctaccctttggggttgaagtcgatcccgcccttcgagtcaagcgcgaggacggcggtgtcttcgacgatatatacgcggccggggattgtgtggctgattggtgtcccatcacgggtgagcgagttccgagccagctcggcacggtcgccgttcgacagggcaagatcgccgggaaaaacgccgctggaggtcccagggcgacttggatgggtaccctcaacaccgcagtgatccgcgtgttcgatctggaggcggcgggtgcgggattgacacagaccagggccgaagaattagggttggaggtggtttcggccaccgtcgagacgaccaccagggccaggtattatccgggtggcgagcctattgcggtcaagttaatagctgatgcggacacgcaccgtatcgtcggagttcaatccgttggaggggaacgggtgagggagcgcgtcgacggtgtcgctttggccatccggctggcggctaaagtagaggacctcctgagctgggattactcctactcgcctccggtcgctcgggttatagaacccatatacgaggccgccgagctccttagggaggagcttcactcatgaagcgcttcctcagagacctttccgccgccacagcatcactgacggccttggtcctcatggaatcgttcacggggattacgctcgaatcccttaagcatcggtgggtgcatcatcctgagttcttggcgatgcttccggctctcatggactttcggggcaacgtggctctcgctcactccgcccgcaccgccacggcgacccatctgggtgacgaggagagggcactgcagagctcactggcggttctcctaatcggcctcatggtgcctccggtcatcggctcggtcgtctactacgcctacggaggtgatttgagtaccctcgtagggactgcgttccttaccgtactgtcggttaccgcggtcgtgacgccagtaacagtcggtatcgtccgcatggcggcgatgttgggtttcgatccggatcatgtcgctccgccactaacaacggctctctcggacgtactgacggtggctttcctgttcacgattgcggaggtgatggtaggttgagcagtgtatggagagggattctcaggatcctccgatcgatgttggtgatttccataattctcgccgtctggagctctttcacgggctcgctgctggctaaatgggaggccaagctcgagcataaccccggtctagccgcgctcctcccagttctaatggcggcggccggcgctgcggccgcgtcgttcggtagccgtctttctacctatttgcacttagggacgttcacgatatgggcggtactgagagacgcgttggtgcaaggctcggccttgctgttggtaatcgcgggctacgccggtctcgtgaccgtcgcgttctccggtcgaccgtctctgatcctgttggccgttgagtcgacggggttaacgttcttgacctctattctcgtggccctcggctcggcgttcacgagcgtaagactagggatggatcccgacgacgtcgttgggcccgtcgtgacgacggccgcggattccgtagggatcatacttaccttaaccctagctccggggtaatggcgttggaaatggaaaaaatcgaagaagaggttaagaagcggacggtcgtggagctccttacggaaatgaagaatctcgcgcagctatccgttgacctggcttactcggtcttactgttcgggagccccgagttggccgaggaggtgcgacgcattgagagacgcgtggacgagttgtctatggtactgaaggcgaagctcgctctggctattcgggatctcgaggacgttcgccatctactgcccataatggagttgacgcagtcgatggaggttatcaccgacgccgcgaacgacattgccgaaaccgtggctatgggtgcggaacctcaccctatcgttcagaaggccatcgccgagtccgaagagaagatacggcttgttcgggttgaagaggggtcggaattagacggcaaaacgctgggagaactcaggctggccagtgagactgggatgcacgtaatcgcgatcaggcgggggtcgacttggataatagggccggataaagacgccaagatactgggaggagatgtcttgatagttcgtggtcgggacgaaggatacaggaaactgaagaagatggctagtgggcgaggatgacatgcgttgggagactaggcgcgaaaagatcgtgtccttgctcacggagagccgtgaacctctgaccattgaggagatagcttacatggtcggagaggacgataaatcgaagattatcgaggacttggaacacatagctaaaacgctacgtcgtgagggcaagacgctgcttatggaaccggctaggtgtaacaagtgcgggtacgtgttcaagagcctcagggttaagccaccgtccaggtgcccgaaatgcaagtccgagtggatccaaccgccgaggttcacgatcagggaatgaccctccgagggacgtccaaggacaaatcgtccaacgttatccttagaaactcacccaccgccacgacgtctcccagatatcgtgagccgttctcacgtatctcgacgacttcgagtctctcggtgatcccaacgatcgcgtccggtctatggaagcccaacggacgacacctcacgccttccactttcaggaagcccgaggagaggtctatcgacatgccacccgcggagagttcgctcccgcgacgctgcgtcatgatggtgagactctcgtaggtcctgacgtgtaggttcttaccgtacagcgtcaccatgtagtcgctgcccaccttgcggacgtctacgaagagttccccgagacgacggtgcgggatgatcggtgggacgacgacgccttctccgatctttcggacccggagcggttcggtaatgacgcgctcctccgtgacacggtatgggaccacgtagtaatacccagaatccgcacgcaccgataccaggcacacggatcggaacttctcaagtcccgctacctcaccgagtcgcacgtacccgtcgtgtgatcggcgcattaccctagcttcttcgcctatgtcgaacttctcacagactaccgggggctccggaacgttctccggcagtttcatccgaacacagccccctccatttcgagtaccgcgttgagtacgccattcaccagctcggaccgtctgcccaacactgcggcagggctccagctgaacattctgtaaccgacgttcctggacgtcaggacccctgcggcttccagtgcgtccagcatcttagtcccgagtttgaactcacggaaattcctgcagattctacccagtatctccgtggcggacaggtacatcgtgcggacaactcgcacatcccttcgggcgatttctcctaatatcgtggaccccgtctcttcgacgagctcgctcacgtgttcattcatctcctcaagagtgccaccacgtttcaacgcttccgggcacggcccgtacggcggccatgtcaaaatgtccttcgcggagccttccaccttaaccagctcgaccgacacctcgcgcacgatgctgtcgggtacgaagtccagaaacacctgggagtagaccacaacgtgaacttctttgaacctgttgagcagcgccgatagaacgttgtacaccttggatctgatactcctgagtgcgtaacggtcacggcgctccaaccactcgagcaccgttggcgcatccatgtgagcaattaccacacggtctgctccctcgtcacacaacgaggtgatgtcggatagccttcgagcatccgatacgtctacgatttcgccgtcttgcgctaacttatggcatacttctctgaacccgtagcacggcgggcagacggtgactttcagcaactttctgccccctcgggcaggcgtagtagtaatctcccccctaattgtattactttatgatcttcaaaccaagctttggtacgctcaaaacgtacctcatcgtactcgatgtgccacaagatcaatccctccgccggaaggcatctgggtttcttcgacggctcgaacttcccagaaagtagcgcttcggcgtccccttcctccctgagcccgtggcctacctcccacacgaaccccgctatcctgcggaccatctcccacaggaatcgcggtgccacgacccgcaacacgtacgcgttaggggttatttctacgagttcacaccgctcgacggttattatcggattccggccatcctcccttcggaatgccgaaaaatcgtgttttccttcgagcttgcgggcagcccgtgccgcggcttcgggacggtttagtggtcccaagaagtaccgatactcctttcgtagcgcgtcgcgccgcggatcgaactcttcatggacttccgttttggctataacccggatgtccttgggtaatctcgcgttgatggggtccggttgggctagctccgggtcgccttctaccacgactacctggtagcgtgcatgggcccccgcgtcggtcctggatgcgtaccctaccagttccaatcccagctccgagagcgcttttcgtagcgctccttcgatcgttgggacgtcgggttggtactggaaaccgtgatatcgcgaaccgtcgtaggcgacccggagggctactctcatcgcccggccccagggggcttgtaagggagcctccggtagacctctatcatttcctcctcggaaactagttcccggtttccgaaacggatcacgggttcgtccacaacctctcctgcgaccgtgaacgggcatccctcttcgaacgctatctcggcagcacgttcgacgtcgtttggatccatacataccatgaagatccctaaataccccgtccacgtggggtacggcatcgaccggagctcgacacccttcttggctttgcccatcatctccagtaggttcccgagtaccccaccgcgactggcgtccttggcggcgctcacgtcgataccttcccgtaggaacctgagaaacgcgttgaatttcaccttagccttgtaaacgcgatccccaacgtccccacgcacaggctcgcccaaaaataccagcgcatcgccttccctggccgtaccgtccgggatcggctcgtcggctatcaatcgaccgatcacgaccacggagacgcagggcactaggtcgggatgggattgtgtgttaccgccgaggatcttgattcctaacccttccgcctgtttccttaaatcttcaaggatttcctccgcctgctcctcgctttcggcctgtacggcgtcgaacgccactatcggttcaccgccggtgaccacgacgtcggccgccgagtgtatgatcgcggtctttctaccgatcttggccgggtaggggccttccatgttgataactaatcgctcaccgtttacttcgatcaccgtggcgtcatcgccctgtagtgggcctatgatcgtcttccactcctccgagacttccctgaataacctgcggcagaagttagtctcttctatgtgctcgaggaggcgctccaggtcgactttttccaaactcacccgacccccagcagcttcagagccgtcggcaaggccagcgctgacgtgcagagcgacggatcgacgccggagcggagcgcgtaaatccctattcccgcacacgcgatcgccgtaccgagcgaacctaacccatgaaatgtcatcaacgcgagcagtccgagtactacggtaccggtcagtactcgcgcccgtgctccggagagcacccctcccaacaccctggtcgaaaagatgagcagccacgctcccaacaccgacacgagtaggtacactcccaccgacgccaacacttcggggtacgtgatatctccaacggatcgttggatgaacaccgaagctccactcctagggttcccaagcgcgtgtagcgccacgatcgaggacaccgcgtcggcggcgtcgataccggaggtgaccagcaggtaccgctcggtcgtgtcgacgcccaaccgcgtcaggacggaaaccacgttggcgggtcccaatcccggcaggaaaccgagagcacaacccgcgagtgcggccaggattccgcatttcgggagctcctttccagatattgcgggctttccaggccgctgcttcgggatcgaagtgcggttcatcagacaggaaagccctggcccgatcgcgtagaatccggagagcatggcttccagtggggaggctacgtcgagcggtcccgaaagaactacgtagcctaccgcggaactcgccgagaagaccgccaacccgcggagtccattatcgtacgtttgtaaggccaggatcgtcagtaccagccacggtattatcggcttggaggcgacgtacatgggtcctacgattttcacgatgtatgggagcgcgaccgccgcgaaaaagcccgtggataacgtccctagggcgacgaggcgagcggcttcttccgcccttccctcgatcgtatagcgctgcaacggaatcaacacggcaaccgacgcctgatcgtcaggtactcccaagaacatgctttcaaccttagacaacgggacgttgacggctgagcacgctgaagcgaatgtcaacacgtcttcacggtcgaggtacgtgggatcgaactccgaaaaaaacgtattcggatggagaccggggatgtaccccgatagcatcccggaaaagattccgagaaacgctccaccggagcaagtccgacccaccggaccggggacttcgagatgctaaaggagctatggcgatcgtttgcgatggcgctaggggctgcgtggacactcggactcctagcacttacggttcacatcctggggctcgtttggactatcgtcctcctcttagggatctcagtcttgttgggaattagtgtctcgaggagagtctcacccttcatcgcggtagcgagaggtctagggttgctatcactcctgatggtaaacgcggctagactggagtacctggcgccatggctcgccatgcccgtactcggggcactctacgtcttcgataggcccgccttttacttggtgatagcggcggcgggagcggtcctactgcttcgagcgctgatagaaatccatgaagcggccgtcgaagcggacttccggtaccggtcgaaggttcagggactggcgttggccgtccgtgagatctggtctgggattatggaggctctagagagactctccacgatctcggcggagaagaaagaggagctgagtggaacgttcaccgttgccggaaagaagttgttgaggtggatgctcagctgaggacgcgtccgcggtccaatcgtcatcatccttcagtagcgcgggacatcgtcatccgcgtccctcccaatcgactaggatctggtcaccttgaactagcatcttgccctccgggacgttcttacggacgacggtggaaggtgcggtggccgagtacgggcccagtttccgtcccggcagtatagaggtgttgatccctgttttaaccccatcacccagtacggctccgaacttcctcctaccggtatcctcgagctcgcccttgactactactttcacgttgcgttcatcgtgtctgaggttggcgatgatggtaccggctcccaggttgcacttggccccgataacgctgtctcccacgtaggagaggtggctgacgttcgtcccctccatgattattgagttcttgatttcgacggcttggccgatgcggacgtcccggaccagcgtcgtcgccggtcggatgtagcagttgggtccgatttcgcaccccgggcctatataggcgggcccttcgactacggctcccgacctgaggatcgcatcctcggctacccacaccggtcctctcagctccacgttctcctcgatgactccttcaacctcgggacgcgacatcgcgttccgaagtgcccaagcgttggcgtcgagtaggtcccacgggcgacctacgtcggaccagaacccgtcgtacgaaatccctagaacaccttcatcgatggcggcgtcgagcagcgcatcggtgatctcgaactcgccccgcggagagggtttgactcgttccaaaaacctctcgaactccggttccgccacgtacactcccgcgttcgccaggttggagggagcctcctcgggcttgggtttctccacgagctccaccacgtacccgtcttgtagtctcgcgaccccgaattccgacggatcctcgacctccactagcaccattgaggcgacgccttcgtgctcacgtaccgcgcgctcgagcaactccgaatcgaacaccaagtccccgtttgtgatgaccacggtctcgtcgggttcgatctcccgccacgcgacgtacacagcgtgggctgttcccaggggcttaccctgacggacgaactccagctcgaaggaatcgccccagcgatccttgacgtaccgttccaccttctcggccaggtattccacgaccaccacgaggtgttccactccgatgcgcttcatggcctcgatggagaagtcgataagacggcgatcggccaccggcaggaggaccttcggccgtgtcttcgtcagcggtcgcatccgggtaccttcgcccgccgcgagcacgataccgatcattccctcacctcctcgacacacctgcggacgatatcgacgaactcatccctgagctctcgggcgcgttcctcggactccgcctccaccgttatccgtatgagcggttcggtgccggagggcctgacgagcacccagccatcgtccagttcgacacgaacgccgtctacggtatcgatgtcgtcgtaagcctcccggaggcgcgtctccaccagcctcatcacttcgggcttgagctcgtcgggacactcgacggtttcgcgcacgaccgggtagctcgggatctcggctaacagttccgagagcggtcgcccttcctcgatcagcaagctcaccatccacgccgcggagagcggaccgtcggggcacatgtgtacgtccgggtgtatccaggttccgttcggttcccctccgaagacgcatccttcctcccgtatcgcggcggctacgtggacgtctcccactttggtcctcaccacctcgccgcccatctcgcggactacctcgtcgataaccatcgaagcatcgacgttcacggcgaccttccctggacccttctcctcgaggattcgccggcacaccaacgccagcacttcgtcgtacccggcgaacttaccttcctcggtgacgaaaactacacgatcagcgtccccgtcgtgggcgatccccagatcagcatccgtcgcccgcacggttcgcatgaggtccttcaggttctcgggcttcggctccggttcccggcccgggaagtgtccatcaggatgcgcgtttagagagattacctcgcaccccatctcgcggagtactaccggagtgacgaacgcggaggggccgttggcacagtccaccacgatgcgtagcccgtccccgtcgacggagacctcgtccagtatcctctccacgtgtacgttcaacgccgtctcgtcgtcgaccacctcaccgtactcgtcccaattcgggtactccagatcgccgtccatgatctgctctatttcacgctcttgttcgggcgagaacgccattccgtcagagtcccagaactttatcccgttgtactcgggaggattgtgggaagctgtgatcattacaccggcgtcgagaccctcagtcgccacgtaacaacccagagtcggtgtgcacactaccccgatgtctacaacatcacatccttgggcggtcagtcctgagatcacggctgcgcgaagggcatcgcagtgtacccgggtgtcgcgacctacggcaaccgtgccgccacccaagtactcgccgagagcgcgtccagctcgaagtgcgagctctggagttaggaactcccctactctaccgcggataccggacgtaccgaagtatttacccacggggggtccccctttgttcgcgttcctactcgccggggataacgttgagttggcgctaatggaattaaagggcgcgctccgggcggaggtcggcgagatcgaagtcgaggtccacgatcgggtcgcggtggtcgaaggactcactgacgaggaggcggagcgggtcgtccggcggctcgcccggacgcatgcggtctaccgggtcggcgaggggagggtcagggtcgagattgggggtgagcgtagaccagtccggctcctcgcggagcgtgagaagctgtccgatcgtaagccgcacaagcgccccgagttcatgcccgactccacggagcctttcctggcccgggtcctggtcaacctggccgaggcgcggcgcggggagcgcttactggacccgatgtgcaacgtgggcggtatcctcatcgaggcgggactgatcggctgcgtgcccgtcggggtggaggtccgggaggaactcgtggagcggaccgagcgtaacctgcggcactacaggatcgaggagtacgagctacacacgggtcgggcggaggaggtagacgagatcctagacgagcccgtccaggccgccgccgtggacccgccatacggccgctcttcgtacatcgagggcgggccggtggagcggctgctactcaacacgttggacgcgttgtctgaggtggtcgagggcaaggtctccctgaccgcgcccgtggacgcctgggaagaagttaaagagagtgtgaagagggtagagggcgaggttcgggaccgggtccacggcagccttacccgggtcatcgccgtcgtcgtgccttagcggtgatgaccgcggaccgctcctgatctgtgatgagttttcggggagctgatcaccggctcaggtacgacagcaccgcgcggatcccggacttaacgatccgcttgaacaggaacagcttgccctctcgcagcgcgttcagcaggtaccgggggttcaggtagaacgacaggtacgcgcgctgcagcaggcgccccagctccctggtgctcaggtgctcagtcctcatcaccggatctaccgtggtatacttcgaccagtcgtgaacctcgatcagtcccctctccttggcgaggtcgtacagcggcgttcccgggtagggcgtgcacaccgtgaactgcacgtagtccggctcgaggcggcgcgcgaacttgatcgtcctgaagacgtcctcgcgatcctcccatgggaaccccaggatgaatgataataagatcctgagtccgtgccttttcgccaccttacggcacgcgatgacgtcctggacggtgatccccttgttgatgcgtttcagggtttcgttgctggccgattcggccccgacgtataccgtgcggcacccgtgctcgcgtatcgtgcgggcgagctccggcgtgagcgtgtccgcgcgggcgccgcagtcccacgggacgtcgataccttcctccctcattttctcacatatctcccgcacccttcgcttatgggcagtaaacacgtcgtcgacgaactcgagtcgctccactcccagctcttccaccaagtaagagatctcctcgaccacccgatccgggctcttccctcgccacttgggtccgaagatcctggaggaggcgcagaagaggcaccggaacgggcagccgcggctcgtgatgacggggacgaaccggacgctgtccgcggagtactggtccaggtctaccttgtcgtacgccgggagcggtagcgaatctaggtcttccggctcctgtcggtcgggatttcgaacaattttagagccctccctgtaggtgattccgggaatattcgaaaggtctgactcctcccaccgatctacggcctccagtacctcgacagtcgtcgattctccctcgccccggattaccacgtcggcagggctttccctgagggcctctcggtccatgaaggtggggtgcgggccgcccagaaacacgaatgccccctcatcctttgccagcttcgcgaccttgtacgccgacggcgccaccggggtcgtggccgttatccctaccgcgtcgtagcctctgatccttccccgtaggtcctccatctcaacaccttcggcgggacagtccaggatgtcgacggagaacccttccttctcgagcttggcggccaggtagactagtccgatcgggaatccccgtactcccagcacgcgggcgatgtcgtcctcgaacggaggttgaaccaacaagactttcacttgttagcatcccccactaggacacagcccgggtcgggcccctccaccttgcccgtgatcgcgtacgcacgggcccggcatccgccgcacacgtaccggtacttgcactcgccgcagggcttctccagctcgtcacggtttcggcacgcccagagcacctcgtgttcccacaactcctccggatcgtcctccagtatgttcccgatcttaactggcaagaacacgcacggctggacgtcaccgttcggccggatggccagcaggcatcggccggcgccgcaccccccgataaactcgacgaggggctcgatccagcggccctcgcccgcgtacgcgaagtgggttccgtagagtacgcctccctcccccgactcggtcatctgcaggctcactcgggacatctgcggcgcggtggagtagatcatcaggtcccggtccagggcctcccgaacgagcatcttgagcacctcctcccggacctcaggcggcgggtccagctccgggcagaaccgaccctggcccgtggggatgaagttgaacactgcgatcccgtcggctccgagctcctccgcgagatccagcatctgcgggagctcgtccacgttgttccggtgcacggtgaaggcgatcacggtgatcatgtccgtctcggcgcagtgacgaacgccctcaaccgttcgttcccaggcacccttgacgcctcggaacttatcgtgcgtctcgggccgagccccgtccaggctgatctcgacgtactcgacgcccgcggcctccagccgctccgccgtgtcccggtcgatcagggtcccgttcgtggcgagcgcggtgaacatcccctcgttggcggaggcctccgccagctcgaagaagtcgtcccgcatcagcggctcgccgccggagaacgccagccccggaacgttccactctgagaaccgctcgatgacttccagcgccctctcggtgtccagctcgccgggcgcgggcttgcccgcctccgagtagcagtgctcgcagcgcaggttacacagcccggtcacgtcccagaccacgagatacggagcggccgggacgaacggtttccggaccccgtaccggtagatccctagcagcgtcacggcgatgcctcgccggtaggagtccagcgagagggcctcccggactgtctcctcgtctacgccggccgcccgggccgtcttctcaacgagcttcttcaccaatcgagccgtcgccttgcacttccagcacgcgtcctcccgaccgccataagccacgtccagcgcgaccttcacgcgcacgtctccgcacgactcgcaccgcttggcccccagcttcatcagccgccgtgccagctccgagtccagcacccggttcagcacacggatgaactcaccgaccctggtcatgcgaagcgccccctaccttagtacaccttcaccggctcgtagagcgtggtgcgctgcacgggggtgaagcccgcctcccgaatgatctccactatctcctcgggctcgagctgctcgccctcggtcgctccggcctcccgggagatgttctcttccatgagggtgccacctagatcgttcgccccggcgtgcagcgtcatctgagccagcttcactccgagcttcacccaggaagcctgtatgttcggaatcaacggtccgaagtacaatcgggccacagcgtgcacgagtacgtccgtcatacccgatactccgggtcgcgcccctcctcgtcggtaaatcggtgcgttcgaatgtacgaaggagagcggcacgaactccgtgaagcctcccgtgtcctcttggatccctcgaagccgcttcatgtggtcgatccagtccctcggtgagtcgatgtgaccgtacatcatagtacaagtggtgggaattcccaactcgtgcgcgatcctgatgatatgttcccactcatcggcttccaacttatcaggacatagccgcttcctcacctcaggggagaatatctccgcggccgttccgggcatcgaatcgagaccggctcgcttcagctctcgtagtacgtcttcgatgtcctctcccgccagcttggcgcagtacttcacctccatcggtgagtacccgtgcacgtggatgtccggggcttgggacttgatctcgtccaacatttccaggtagtactcaaacgtcgcctcgggatgcagtccgccctgaagacatacttccgtagctccagcgtcacgggcttccgctgcccgctcgcccacctcctccggcgtcatacggtaagcatccgggtcgtccggatccctccggaacgcacagaatcgacatctgttaatgcacacgttggtgaagttgatgttcctgttcaccacgaacgtgacgtgttcaccgacgatcttaagtcgggcctcgtgtgcagcccgcattaccttgtacgggtccagcttaccctgtaaggcgtccaacgccgttccttcgtcgatgccaccggccacggccatgttcaccagctcgtcgacgctgacttcatcgggcgaatccctcatcgtccgagagccgctcgacgacttctgagatgttggcatggtaccagccccgacggacgtactcggggtaaatagggagccgctcccttaacctgaaaccgacgtcttcggtcagtcttttcagctcctcgatctcgggccagggggcttcggggttcacgtaatccttcgtcacgggggaaactccgccccagtcgttcgcgcccgccaacagcgcgagctgacccgtctcacggttcaggttcgggggtacttggaccggaacgtccggcagtatcagccgcgccgtcgcgaccgtccgtagtaagtcggcgggtgtgggttcggggtggtcctccatcgggattcccggtttcgtcctgaagttctgaacgatcacctcctgaacgtgaccgtaccgctcgtgcattctctggatctcttccaaggtcttcacgcgttcctcccacgtctcgccgatgccgatcagtatcccggtggtgaaaggtactttcaactccccggcgtatttcagcaccttcagacgctcctcggggcgcttcccgggagagtgttcgtggggaccactttcctcacacaaccgctccgatagtatctccatcatgaggcccatgctggcgttccaacgacgcagcttccgcatctcccgcttcgtgatcacgccggggttgctgtgcggcagcatgtcgtactcctccacgcatctacggcagaggtcgacgaggtactcgacggtgctcgaatacccgtgctcctccagccattcgagggcctcgtcgtaccgctcctcagggcgctctccgaaggtgaagagcacctccttgcaaccggcttccttacccttctccacgatctcgaagacctcttccggggagagatacggcgacctcacctcctccggttcccgacggaaggtgcagtaagcgcaccgattccgacataaccgggtgagcggtacgaacacgttcttcgagtaggaaaccaccgtgccgaacttctccctggtcaaccggttcgcccggtccatgagctcgaggagatcgttgcccttcaaacgtccgccccggtcgcttcggtcacccgcggggtttaatcctgagcgcgtcgggacagacgtaatcaaggggtacgcggcgggcccctcggaggtcgtgggggctggggagatggccgaggctctcggcgaggaactggagcgcgaaattcagcggagatgggaagagatggacctactttcgaaggtcctagagaagaaccgcgacggacctctcttctacttcctcgacggtccaccttacgcgagcggctcgattcacctcggtacagcctggaacaagatcatcaaggacgccgtgaaccggtacaagctgatgcgcggataccgggtccgactgcagcccggttgggactgccacggtctcccgatcgaggtgaaggtcgagcaggaggtcctctcggacgagatcgagtgcaagaaggacatcgaggagaaggtcggcgtcgacaagttcgtggaaaagtgcaaggaattcgccctgaagcacgtagagatcatgacggagcagttcaagcgtctgggcgtcctgatggactgggacaacccgtacatgaccctggacaacgagtacatcgagggagcctggtacacgctcaagcgcgcccacgagcgcggtctcctcgaccgggacgtgaggatcgtcaactggtgcccgcggtgtgagaccgccctggcggaccacgaggtcgagtacaaggaggtcgaggacccctcgatcttcgtgatctttccgatcgaggacgattccgacgccgaggtcgacttacccgagaactcagccctgctgatctggacgaccaccccgtggacgttgcccgccaacctagccgtcgccgtgcacccagaggaggagtacgtcctcgcgcgcgccgaggtggacggcgaggagtggcacctgatcgtcgctgacaagctcaaggtcgtgctgtccgtcgtgacggactcgtacgagatcgtggactcgtttccgggagaggcgctggagggtctccggtaccgcccgccgctgtgggaggaggtgcccaagctgcgcgagctgcacgaggaggacgaccgtgtccaccgcgtgtacaccgccgagtgggtcacgatggaggagggtaccgggtgcgtccactcggcgcccggtcacggtgaggaggacttcgagctcggccgagaggtcggcctgcctccgcactgcccggtggccgaggacggtacgttcacagaagacggcggtaagtacgagggactctatgtgcgcgacgccaacgagaagatcgtcgaggacctacgtgagaagggactcctcgcgcacgaggacaccgtggagcaccggtacggtcactgttggcgctgtaagaccccgatcatctaccgggctaccgagcagtggttcctcaaagtcactgaggtgaaggacgagatgctcgagtggatagagcgggtggagtggatcccggaatgggcgggtcactcccggttcaaaagctgggtcgagaacgcccgggactggtgtatctcgcgtcagcggtactggggtatcccgcttccggtctgggagtgcgaggagtgcggtcatctcgaggtgatcggctcgctgagcgagctcgaggcgaaggcggtcagtctcccgcccggtgaacccgacctgcacaggccctgggtcgacgaggtagtcctgaagtgcccggagtgcggctcctacatgaggcgcgtgccggacgtgctcgacgtctgggtagactcgggagtcgccgcgtgggcctcgctcgggtacccacgtcgcgaggacgagttcgagcggtggttcctcaaggagggacgctgtgaccccgacgatccggaggcgggcgcggacttcatcaccgagggtcacgaccagacccgcggatggttctactcgcagctaggttgtggcgtcgtcaccttcgatacgtgcccgtacaggaccgtgctcatgcacgggttcacgctcgacgaggaaggtcggaagatgagcaagtccctgggtaacgtcgtcgacccgatggacgtcgttgagaagtacggtgccgataccctacgctggtacgtcctgcgctccaacgcaccctggcgggatatgcacttcagctggcaggacgtgcgcgacacccaccgggcgctcaacgtcctgtggaacgcgtaccggttcacgaagatgtactcggaactggacgagttcgaccccgaggaacacccgctggaggatctggaggagcacctcaagccagaggatcggtggctgctctcccggatcaactcgctggtggaggaggtcaccgacgcgttcgagcggtaccacgtccatgaggcggcccgcgcgctgtaccgcttcgtcacggaggacctcagccggtggtacatccggctggtcagggagcgcgtatggctggagggtgacgatcccgagaaactcgcggtctacgcggtgctgcactacacgttcgatcggctggtcagacttctggcgccgatcgtgccacacgtcgccgagcggatatacctggattacgtccgcgcgggcgacgatccagagagcgttcacctcacggactggcccgaagtagacgaccgatgggtcgacgagggactggaaaaggccatggagctcgtccggaaggccgcggaggccgccctctcggtccggcagcgtgccggggtcaagacacgctggccactacgtcgcctgttcgtggaggtcgaggatccgaagcggctagaggacctcaaggacgtgctggcccgcgtcgcgaacgtcaaggaggtcgagctcggggaggagttcccggagaaggtacccgtggccgagccgaggcccgataagatcggtcccgagttccgatcgctggcgggccgcgtgatcgagcacgtcaaggaccgcgcggaggaggtggcgcggtcgatcctgaaggacggggagtacaggaccgagctggacggcgaggatgtcgtcctgacggaggagcacgttaaggtgaccgaggacctgcccgagggctgggaggccgaggagttcgagggcggccgggtgtacgtcttcgtcgagctggacgaggagttgaagtccgaggcgtgggccagggaggtcgttcgtcgcgtccaggagatgaggaaagagctggacttgaacctggaggagaggatcagggtgtggatcgaaacggacgaagagatcgcggaggccgtggaagagcactcggaatacgtacgtggtgagacgcgggcggacgagctccacgtgaacgagggttggcccgaagaagtcgatctggagcgcgagtgggaggtggaggacaggacgatccgcatcgccgtggtcgtttcggggtgaagtggatgaaggtcgacccctcggagttcgagctggagttcttcgaggagatcgggttcgagcgtaagcgctgtcccgagtgcggcgagtacttctggggaccgccggaggccgaggtgtgtaacgagaccccgtgcgtcgagtactccttcatcggcgacccaccggcgtccgtgaaactggacgtatgggaggccggagaggagttcttccggttcttcgaacggcacgatcacgaggtcctcgaccgctaccccgtcgtcgccaggtggcgggacgatatccacctgactatcgcctcgatagcctgcttccaaccttgggtgacctcgggggaagttcctccacccgccaaccctctagtgatcaaccagccctgtatacggctcaacgacatcgacaacgtgggtaggaccgggcggcacttcacgctcttccacatgggaggccaccacgccttcaacaaccaccctcacgaccggagggacatctactggaaggaggaaaccgtgcgcctgtgctacgagttcaccgtggaaaagctcggaatccccgaagagaagatcgcgttcaaggagtcgtggtgggagggcggcggtaacgcgggcccgtgcttcgaggtggtggtcgacggactcgagctcgcgacgctggtgttcatgcagtacgaacaggtgggaggggagtacagggagctccctcagaagatcgtcgacaccgggtacggtatcgagcggtacgcgtggataacgaccggcgaacccacggcgtacgacgcggtcttcggagacctcgtggacgccacggcccgcgacctcggtgtggagatcgacggggaggcccgtgagatcctcggtgagctggccagggtcgccggtctgatggacgtcgagacggagtccgatctgcgggtcctgcggaatcgcgtggcccggagactggaccttgacgtgaacgagctggtgcgggtcgccgagccggtcgagttcgtgtacgggatcctggaccacgccagatgcctcgcgttcatgctcggcgacggtgtcgtcccgtccaacgccggcgagggctacctggctcggctcgtgatccggagggcgcttcgcctgctggacggtctggacgccgagcgtgagtacctgctggaggtagtcgagagggtcctcgaagaccttcgcggcacgtacccggagctcgcggagcgtgaggagtacatccaagatgccttggagtgtgagatcgaccgctacactcgggcgttgaagcgcggaaagaaggaggtcaggaagcgcctcgaggagaagggtgaactgtctttcgaagacctcgtcgagctttacgactcccatgggattccacccgaggtggcgcgcgagatagccgaggacgagggcgtcgaggtcgaagtaccggacgacttctattcacgtgtggccgagcgacacgaggggcccgaagaggtcgaggagggccttgaagaactggagcggatcgcggtggaagaggaactgccggagacggagctcgccttctacgacgacgagaagcgactcgagttcaaggcggaggtgatcggtacttacgaggtgaacggcgatgcctgggtcgtcttggaccgcacgtacttctacccggagggaggcggtcaggaggcagatcgcggtacgatgcgctggaaggatggggaggccgaggttaaggacgtccagaaggtgcgtggagtggtcttccaccgaatcgacggggacgtaccgcccgagggtgccgaggtcgagtgcgaggtggacggcgagcgcaggatgcgcctgaccagaaaccacacggcgacccacgtgatcctcgaggccgcccgacgcgtcctcggcgatcacgtctggcaggccggcgcccataagtccacggacgaggcgcgtctcgacgtaactcaccaccggcggatctccgacgaggagctccgggagatcgagcgtcttgccaacgagatcgtgatgaaggatttacccgtcaacaagcggttcatggaccggaacgaggcggaacgtcggtacgggttcgagctgtaccagggcggtgtggtcccgggacgcgagatccgggtggtggagatcgaaggatggaacgtacaggcgtgcgcgggtacacactgcgacagtaccggtgagatcggtccgataaagatcgtgggtcgggaacgcatccaggacggtgtggagaggatcaggttcgccgccggtgaggcggccctggaacgcatttgggagaccgaggacctgttgcgcgagacgtgcgaggtactccgggtgaacccggagaaccttcccaagaccgtgaagaggttcttcgaggagtggaaggagcagaggaagcggatcgagcgcttggagagggagctggtggaggcgaaactacgtgcggcgccggcggagggtcgccgggtcggcgatttcacagtcacactcgtggagctggaggacgtcgaggtcggctccgtggccggtactgtcgaagaactcgtcaaggagcacgagaacctggtcttggtggcgaaaatagtatccaacggatcctgtcaagtcgtcgtgggttcgggcgaatcggcaccgccggccggcgagctaatgcgtgaaatagggaagttgatcgaaggtggtggcggtggagacgagcgactggctcagggtggtggacggaaccccgacgggttaaccgaagatcggctggtggagatcgttgaggatctcgccgggggatgaagaacacccccggcaccgaggacgaccggtgaggagggtggtccttacgtcctgaccctcctcccccacgaaacacgccgttctgacgcctgatgatcttccgccgcacctcgctcctcgctccgctcttatttgtgcgaatgttgttgcggactcgaccggtgacagagccggcacggaggtttgagttaaaaggatactatactgtttcctaaattacgcttccgtttaccgtgcagcctccgggtggaggtgcgggtgggagtgtcagatctctagtcgcacaaaattcgccgagccgcggaaggcttccaagtgtccgaaatcttcagtcgcacaaatatcgacgtatgggtcgcgaggggaggggcggtcaaagctcgtgacgcaggcgctccttatgctcttgctttttaccgtccacgaacgaatccactggcgccaggtacccggtcaccctcgaccatattgtgcacctgcggccgcactccggacactgctcgaccactccctcgtaggtacgctggcaccggtcgcacacgctgtaatccctggtgatcgcgaggaaccctatcgtgttccgacggagcacgcgcacggtcagcttcatgaggcttctcgggtccgtccgctccccgagccagaagtgggtgatgtggcctcccaaggtcatggggtggaacttcgcctcgatctcggcccgctcgacgacgttcacgtcctcgtcgtacggcacatggcacgagttcgtgaggtagggacggtgctccgtaccgcgtaccttcgcgtccgggtacttctccaggtacttcctggcaaggcgttcggcggccgattcggccggtgactgcacgaccgaccacctgcgtccatcccgctcgtggaactcttctcgcacgtcgttcagttcctccagcacccgctcggccagacgcatcgccgagggatcctcccagaagccgtatcccgtgaggacctcgatcgcctcggccagcccgacgaacccgaggctccacgtcgtgtgctcgtaccggaagtagtactccccgtccggcttccaacgctgacacccgtcgtacagtcccgcctccaggcacttcttgacgcatctccaccgcgccaggagagcctccctggccacctcgcagtactcacgaatcttctccaggaattcgtcctcatcacgtgattcgtgggcgaggagaggtaagttcagcgtgacgtactcgaagttgccggtgcggatggtgtcgatttcccagtctccggtccagttggtggcgaggcacgtcctacatcccatgtagttcacgttgtcgcccacgagcttgcgccagtcccgattaagcatgttggcgaagtacacggccccgttctcggccgcgacttcgaaggcgagctccagagtctccttgtcatagccgggtcggactttcacgattatctgcgggaacttgagcggagcccccgcggcgtcaccctccagctgcacgtccaggagggctcgagcgaacatgatggcttcttcctcgaagtcgccgtaggtacccacgatctccccgccaggaccgacggcgggctcgtcctctaggaagtccggacacgtgagctcgaggttcacgttcgtgaaggcgggctgccctcctcgagccactaggtcctgagtggcctcgaacatcatgatctgggcgagctgccgtatctcctcgtaagacagtccctcctcggctatataaggggctactaggaagttaacgaagtcctgaccttggccgcccgcgaagaagttctgcgaggtcatcagccacttcaggatgtgtaacacggccacctccgcgtgcttggcgggcttgctcacgcaggtcagccgaccgatcgggttccgagcgtacagcccgtacttcagcacccaccggcagtcgtgctggcagcagttcgacctggtcaacgcgtagtcgaggtcgtggatgtggatgtacccctctaggtgcgcccgtgccgtcttaccgtccagcacgtgcttaaggaagtggcgtttttgccatcggtcttggaagatctttgagatgacctccggagtcggtagcatgttggcgttgcgggcgacccggaggggttcctcaagaacctcctcggggatcccggtcaacccctccccccgtaacgggggctgggaccctcctgtaagctcccttcgcccacaagcggacgtaggcgcgacgtagacggggggtattgagcacacgggcgaattgagccgtacaggttttttcgttaagaaaaacgagggtcgaggttatggtccttccaagatatctcggagccagtccagcacctcgaagctcatctcgggatcggaagcggcgaacctcagcagggaggaagcgaaatcggggcttcgctcttccaccaattcgcgaaagattttgaacgcatggcgctccgaggccagtgccgtgcgtacgtattctcggacgaactcgggatcccggatgagttccggccgctccacgagcttctcggcgacgtcttcgccgatcttggacagagaagtcacccaccacggtaggtgggcggcgtcctcccagctcagagtcaagacgacgtcatccgacttcaccctgacaccacgcacgggttccgtagaaccgatggaaaccccggactcgagcttccgcagtgcctcacgaagcggtcgtacccctatgatttcctccagatcctccgcggtatgaagcaccgacgtcggctccgaggactcgacgggcacgttcaagctcatgatcaaacccgtcgcgatggcgaccgcgcaaccggcctcgaaagcgtccgtcgagtcaccttcgatccacacctcccagggtgtcggagcttcgacgtcgacgtcgaactcctcgggcaaagtttcggggaccatccccagatcgagcctccgtgcgaaccatacgagtcgagctatcgacatcggtacgctccggagcggccggaagcgacgtcctttccaccacccctcccaccggtagacacccgcccatacgtccgcctcgggctgcttcagattaccacgctcttcacccagtcgaaccatctcgtgccgatcgagcagcggatccgggttttcggcaggattaatagggccgcggacggcgacgcggacgtcccaatcttcgggcgctttcaggagctcctccgggtcggctgggagaacgccttccggtgtctcgacgagcagacccaagaagcacgagtccgatcggtagagtgacagctcggcgtagtccgtgaactccgcggctaccggttccacctcaccgaccgcttcgaccaagtaaagatcgacactcggggccctagtccggacgaatttctccccgagcgacgcgcgatccgcgaactcgatgatgctcctctcgcggtgactcagttcccgagaatccggggcgtcgagcaccggagccagctcatcgacgcaatcccactcatccccccgatatcccgtgcactggaggagcggggcgcaggcgaacgtcgcagcggcgtgaacgacgtcctcggaacctcgctgagcctccatcaccgcccgaacgagtgctaacaggactctacctctcgtggcgaaccccacgtcgcagtgttccggctccgcgaacgggcgaccacctcgaactacgtaaggtcgagctgggaccaccaggtccaacgaggacatctgtaggcgatcgagtagatcccccggtgtattgtagcgctccgccaacaactcgctcacgtcgccgactggatcctcgcagcgggctctgtactcgaggtacacggggtctcgccggaacgtggcccgaaaagcgtgacgtccgggtctgaggcctcgctttctcggactctccctgaaaacatcttttagctcgaatccgggttccatccgcgatcctccccggtgatgactgcgctacagaccgagatttcgatgaggaggggccgcttggctgagtgaagaccttagcgggctgatctacgttgaccgagaaagtgaggaggatcgtgcggatcaaggccacgggcgacgtggtccgtgccctgtccagggtggtggaggaagggttggagctcagcatactcaacgcgtccgtgtcgccggatgccgtggccgccgagatcgcggttcaggccgtcgacgacgagcacgtacggaacttcctgcgtaccctgcgtgagttcgggatcgaggtcgaggagatcgagaagacgttagtacgtgatgaagacagatgcttgcactgcacggcctgtcactccgtgtgtcctaccggggcgatcgagctcaaaggagtcgaggtcgagctcgacgatgaggagtgcatcgtgtgcggatcctgtacggagatatgccccgtaggtgctctccgcatcgcgtccaaagagggtgagcggggatgaagttctggatcccccaccctggccatacttccggtctcgaggctctcctttccgggatcgacgacctcgggcgggtggaagccgtatacaccggaggctctcccgatgaggtcggtaccggcaggcccaaccttcactacccacgactcgacgaagtccgcgagcaggtcgagctggcgcactctcacgacgtgctgtacgacgtcgtcatcaactccacctgtcccctccggggcgaacctaccaggcgcgtggcggagcgttactcgaattatctagaagagctggaaaaagctggcgtcgacggtgtggtggtggcggaccccttcgtgctcaaactggctgccgaggtcttcgacaggatcacggtctcgtgtctcgctttcgtcaacacaccagaaaaggccgagttctacgccgacgtggcgacggcgatcacggtggacaccagcttcaaccgccggttcgaagtcctggaggagctctcccggctccaggtcgagctgaaggtcatcgtgaacgaggggtgcttactcgattgtccgtaccgacccttccacttcaacatcttctcgcatctgtacggccccgacgaggtgtcggtgtacgatgactactactaccgcagatgcatcgcggaccgcttggaacacccggagctgataatcaagtcaccgtggatccgccccgaggacctgggacactacctcgagtacgtggacgcgttcaagatctctgggaggtcgcatcaggtcgagtggatagtcgaggtggtgaacgcatacctagagggtcgctgggacggtaacctgctgcacatcttggactgcccacgtgagcttcgggacgtgttctacgtgcccaacccggaattagacggtgcgattgagaggtggaaggaatgcgacttcaggtgtcacgagtgcggcttctgccgtgaactggccgatcgcgtggttgaagttcgagagttcaagagcaccgtcgtaggggaggtgagcgcctaaattgtccaagaagctactgcgtaggtgcgccgcacagctcaaacgtgtgcaggatgcgctcggggacgacgcggtagtctccgaggttgacctgttcgtggcacggtgcggttgtgtaggtgtcgtgttcatggtccggggcgtcgagctacgagatatcagcgacgaggttcttgacggactggaggaagccgggaaggccctgggcgtgcgacccgacgtggtttacgcgcgcgtcgtccccggcacccaagtggtgatcgatctggccgtccgaacactgtgcgacacgtgtcgtcgcgagttctccggggaggagcccaggcccgacctgaaggtgctcaggggcgccaccgagcgttgacccgaagatggtacctgtgttgttcacgtcaccacctcgacaccgtccccgaagactccgacgggatcgtcgtaccggtcaccgagcacggtgtggccactttgctaccccggtatccggagacttacgaagtggaggacatcgtcgacgtggcaaaagatcgaggattatcggtgcaggcgctcatggacttcacgtgcgccggctgtgagcatctatctcccgatggctatccctcgcttcgttcgaccctcgactatttggcctcggacttggaggtcgacggtgtggtggtggcggatccgtacctggtggaagtgctcgctacggagtacgatctcacagtggtagtctcgcataccgccgccgtggatactccggagaaggcgtggcacttcgagcgactcggagctgacgtcatcactgtggatccggcgctgaactcgaacgaggaagaggtttccgccatccgagagcgggtcagtgtcgaactccggaccgccgtaggcgcgattacgttccgggacccggtcgccttcttcgagcgtaacctgttctcgcacgccacggccgagggaatcgaagtggacccctaccgtaacaatccctacgagccgatgagggagagggtcgttgtgtgggaggttcgtgaggagctgttcgacgaggtcttcatcctcgcctccggagaacctccgtgatatcggtcctggtcactatccccacgaccctgttttccccgtccaccacgggtagacatgagatgttatgtctgtccatgcgccttaacgcctcgtcgacggactcgtggggcctgatcgtgatcacgtcctcggtcatgatgtctttgagtcgcctcttcccctctgcgacggccgctgcgatgtcccaggacgtcacgatccctacgatcctcccctcttcgtcgaccactgggatgtggttgatctccttctctatcaacctccgcgcgacgtcctcgatgctctcgtccggtgacgccgtcacgacgctctcggtcatgatatccctgacgcgggggagggagggcggtcggtaaggcatgggtctgaactcacgctccctaggcagtggctctacgggttgggtcagcgtgaactctccctcctcgatctcctccttgaggcgctccgcgatctcgagggccatcttgtaactggacagtgctcccgtcctcaccgttctaccttcgatctccactttcccggatctgagctcttcgtaggtcaccctcttcaccacgggtcggtcccgggacggtatcccgtagtcgacgatcggcacctcgatatcggcgtcgctcacgcccgtggaggccgctacccgctcgtcgagcacggggatagggactccgatgccgaccgccaggcttacaccgtacttctccaacacgacggggcgtaggtactcggggtccgcttccttcagatcgcccctgaccatcagcgtcgccatgccgctggagggatcgtgttgcgtgccttcacctatgatgtatccgtgagatccggcgagccatatccgcgtacctatcccgatggttcggaactcggggtcgttcgcgagcggattcagctggcccgcaccgcagtacgtgacgttcccgtactcggggagcagcttgcccatgtaggtgtacagggtctcttcggaagagttcgtcgccgcgacgtacctctggtaggaattcctcggattgactatcacggcctggttgatgtcatcgatcgtgatcagcgtctcgacggactccctcgggtaacagtcggtgacggacccctccgcccgcaacacgacctcttcaccggacgccagctcgtggatcacgtgtgcccctccgtactcgatgccacgatcctcgctaggctgggtagcgcccagataagcgtccaccgccgcgataccggtgtaggcttccacttcgttcaaccagactcgcctcatcttgatcggggggtccgagtgcccgaagttcaggaacacgcccgagctgcacatgggtccgaaggtagcgcacgtaaccacatctacctctttagcggcacgttcgggcccgatatcttcgacgatttccaccatctcctccgcggtcaccacacagacctctccacgctcgattcggcggttgatctcatcgatactcttccgacccggcaacgccggaaccccgcaggccgcggtggagcacgcccagttcctcctccagcttaagcaccttccccggatccgctgacttcacggggttgcgcggtgccagcggacacgggcgatgctccttagatacctcgaaaagccccagccgttccgagaggcgttgtacctcgttcttatcgaaacccaacaacggacggaagaccggaaaccgtgccacgcgatcgattaccgccaggttatccgggatttggctcgccacctgtccgatgacgtctcccatgaccacggccacggctccgacgttttcgcacacgtcacacgccctacgtatcatctcccgcttgcacaatacgcatcggtatcgggccgattcgccctccagcccctccagactctccatgaaatcttcgaagtcctcgatcaaaagctccacgtcggacggtaaccactcggagaacttcccagcgagccgttctacggcgtccacctccgacccgtacttaccccggtccaaatgcagccagatcacctcacatccacgacgagctgcgtaccaagcggctacagggctgtcgataccaccggataccaggcatacaacgcgggactgagagccgtaggggagaccgcccgggccatccttcatccacgagtccaggtacacgaaggtcccttcgggccgtagttccacgtgaatctcaacctcgggctcgtccaggttcacggtccaaccggtgtatcgcctgatcaggtcaccgagttccacgttcatctctcgggaggagggtgcgtcgtgtgtggctctccgggcccgtacggcgaacgatcgggcctttaagtcgttcagtacgtccttcatttccgtgaacacgtcctcggggtcgtgagagtcgacgcggagcgtgcgcgtccaccgttccacaccgaaggttttaccgatcgcttcgggaacctccggatcggcgaccagcaggcgaccctctaaccgtttcactcgcccgccggactgttcttccaaattccgggccaacagccgctccatgcgtcgtcggaccggtggggacttaacggctatctctccgtacattaccaagcactccacgagggttaccccgactgggtccggccaggacggacgctttggaggttgtgtgacgcacggagggggtgttcgacgctgggactgctggattcgttgctcggtggaggagatgaagggtccggggaggccgaggtgcgggaagtgcgggatgaggtcatcgaagtggagctcatccgaggcccggtgtacttcaagaacgacagtatcatcgcggctcggggcgacctggaattcttggcgaccaagccggttcgctcgtccggagggatcacgggactccttgagaaggtgctcaaggcgaagctgctcggtctgagacggtacttcgtgaaagtcgatgggtcgggagtgttgtacgcgggtgacggcggtaaagtcaaggtgctggaggtaccggagggtgagaccgtcaccgtgaaccaggatcggctgctcttcacgactactccggccgacgtggcggctcaactcgatgcgagcgtgctcagtacagggctcatcgacatgggattcgagggcccctgcaagatcgtggtcacagcggagtgtgatcccgtgacagtcgaggtggacggaggtcctgtctacgtcgatccggagtgtttgatagcttggaccggtgatctgacgttctccgcgacctggaagggaagcgcgttcgacttcttgctaggccgggagcacggggaggagttcctgctcgaagcgcacggttacgggaaagttctagtggctccgtacgacgagaggattagacggttggagcgtatgatccgtcgtgccggtgcaagaggaggtggcgtcgtcggtggaggcgagaactacggggaagaatacggagaagaatatgaagagtatgaagagtcgtcggatgagggtgggctgttcgacgacctcttcgacttcgactttgacaccgacgacttcgacctcgacttcgactgacctccctcccccgcggcctattgttattaattccataacgatctcggatggggccgcggccgggatttgaacccggggccaccggctccacaggccggcgctctaaccaggctgagctgccgcggcgctcccgaaccgccacaccctacgcttgattataaaggtttccgaccggccgcccagaccaccgaaaccaacaccgccagtatgcagcccgctaagtacgctctactttggtgcctctcccaacccacgtagcggacgatcgcgggctttccgtcggtctttaccagcatatagggacctacgggacatacctgtccctcacgcccgttcacagcccagaacggggcccatccccatggaatcagtacgaactcggctcttccgggcgttcgaacctcgatctcgtccgagtcgatcctcagcgcgtcatcacgcggtccgttaacgacgtctacgtacttcaccagcctcgcgcttacctcgtcgacatcggcaccccaagaccacgggaggaggccacctgaaaccctcatcacgaccctcgcccgtttaaccagccccagttttaccgcctctctccagcccatcttatcgaccacgagtacgtccccggtccaaggcaactcgttgggatcgagctcttgtcccgacattacggtcctggggtacaccccgggcactatcggcggtcgtcctaaggcacctgccagcttcgcccacaggatgccatacaggctgaacgatcccacgtacagtaccttgaaccgcttcacaggcaccgcgtcgtccagcgttaatacgggtctcccacaccagctcacacggtcccttcccgtcgatctccggacggcggtacctctaacgtccacgtatccgatcgggagggctcgcaggtacgggtcgagctccttcctggtgacttccacggccttcgagaactcccagcggctggcgtacaggtacgagcatacggacggatcgtttaccagcaccaggaccggagtgagcgattgcaactgcggttccgaagccccctgatagaacgctccggctatcgagtaaacgggctttccggagaattccggtgacagggcctcgaacccgttgtcgccggctaccagtaccctccaactcgccgttccggcggattcccagtgcatgggctggaacgataccatcagtgctaggatggggaaccctaccgccgaaagacccgatccgaggtaggcgatccgtcgaagtcgctcgtaacgctcgacgactatcatcgacgagagtatcgccgtcagcagtaccctccacgggtccagttgagacagcggccataccggcccgacgatcgcctccgtggaccacaagatcggccaaggtagcaccgggagtaccgatccaccgcctcggctcgccgcgaaaaccgcccacagcattcccagtccgggagctacccaatgttcccacggggacgcccgcgtccacgcgggtggtacccatgtgaaggccgacgtcaggaagtacgtggacaggaccgcggtcggcaccgccggcaagagcgccaagagaagtctcctctcctccatcgactccagcaggagggccgggaggacgtacagggggtttcccaggagcgataacatccataaccacagtaccggcagaccgcggaggacgcttcccctacaccttcgtagaatcagcgccgcacccgccgttcccaacgaaaacgtcgtgaccacccgggtggagaagacctctacgatctggaagggcacgctggccgcgtacaccatcatagccgcgtcggctctaggagtggacatccccttgaatttgagtatcgaccagatccagcacggtagtgagcggtagacaccgtcgatcagcgtgcacgcgagatagggatccgcgagccaccggtggaagagcaccgcgggtaggaaggggagtaccggatagtcgatcatcgggggcctacccgtgtacgagtagggatcccagtctcctctggctagccctctcgtcccgagcaagtacaccttatgtgcttgcacggccaggtccataactacggcgtgtttcccccaaagttcagggatggcaggcgaaagactagctaccgtgacgaggagcgaaacggccacggcctcgaatttagacgacctgatgccgttcccccggtctaatcgtaccgcagcgcttcgcactcctcctcgtacgtcgagtagaagtacggcgagaccgcggcgaactccgcggcgcacgtatccaccagtttgtacgtggcctccacaccgacacccagccgagcctcccggatctcgtcttcgtccaccccgagcagctccgctatctgctcgtccgagaaacccgtccgcttgacctcgcggacgaactccacggtttcctcgtccgcctccccggtccggatgaactcgagcaactcatccttccttcgtacgatctcgtgttccatctcgacgatccgcttcaccttctccacgaaccacgggtcgataccggatagttccgagatctcctccacgctcatcagaccgcgcttcagtgcggcgtagatgcagaagatacggcgatcgttcggcgtctcgatcttgcggcggatctcctccggatccgcctccagctcctccggtgaaggccctaagccaggctctccgatttccaacgatcgaatcgccttctgaagcgcctcttcgaacgtccgcccgatggccatcacctcacccacggacttcatctccgttcctagcgtccggttcgcctccgggaacttgtcgaacggccatcgcgggatcttcaccaccacgtagtccagggccggctcgaacgccgcgtacgtctctccggtgacctggttctcgatttcgtccagtcgcagccctatcgcgatcttcgcagcgatccgtgcgatcgggtatcccgtggccttggacgccagcgccgacgatcgactgacacgcgggttcacctcgatcacccggtactcgcccgtctcccggtgcagcgcgaactggatgttgcaaccgccctcaacacccagcgcgtcgatgatgtgcagcgccgcgctgcggagcatctgatgctcctcctcggttagcgtctgagcgggcgcgactacgatagactcgccggtgtgaacccccatcggatccacgttctccatgctgcacaccgtgatgcagttacccgatccgtcccgcatcacctcgtactcgatctcggcccagccacccacgtactcctcgatcagcacctggttcacccggctgtactcgaggccccgctccactaccctcttcagctcctcctcgtcctccgcgattccgccgcccgtaccgcccagcgtgtaggcgggccgcaccaccaccgggtaaccgatttcctccgctacctccttggcttcctccaccgaagaaaccgcctcgctcgcgcagacgggttccccgatcttcttcatgaacgcacggaactcgtcccggtcctccgcccgtacgatggtctccaccgatgtccccagcacctctacgtcgtactcttccaaaacgcccatctcgtcgagctcgaccgcgatattgagaccggtctgacccccgagcgtggggaggattccgtcgggtctctcctcctcgatgatcttcgctacgatccgggcgtccaacggctccagatacactcgatccgccatgttcggatccgtcatgatcgtcgccgggttactgttcacgagaactacttcaacaccctcttctctgagcgccttgcaggcctgagaacccgagtagtcgaactctgccgcttgacccacgatgatcggtccggatccgatgatcaggaccttattcggagtctcgggcacgtgaacccgctcccgaccgctcggatcggcttaataaaatcgacggagggcaagttcggcgttaccggcgcgcggatccccagtgcaacttttcgacccttgccatttaactggggtgaacgtacggaacgagtcgattctccgagcacgggcggtgtgcacgggtagtgtgggaggaagacacagtattatcgacggttcaccgcgagtgggggttggcaacttcgatttaagcccatgagctttttcatcagggaatgttttattgcccacggcgagggaaagggccgcggtgttcacgtttcggacatttctcggaagttgagataacgagactacgggtgcccggcgcgagtggcgtttcgtcccttcagggggccgaggattgtcgtcagacccacgacgtccaaccaaggtaccctgggtgaaggcgatggttatcggactaatcgcggtaatgagcgcgaaggcattgtttcacgagtgggtagttgccacactccatcccacgaacaaggaccgtctagtaatgaaggtcgaacgcgtaccatgccgtaccggggacgatctacggccgggaaatgtcgaagtatacgctaaggtatacggatgtaccaagtacgctacactcgggtacggatctcaagatccccgtcggatcctcgtacccgcgctcccaccacggctcatgtcactaaccgtaacggttgctggcaacgtgattcgggtgttcagaacgtgttttcccgccccgtttatcatagtaaccgcgactaaattaccccgaatttccgtaaaccagtacgagattcgaatacattcaccttgtaagattctactccaacctaccgtcacggggctactgaagtacttccctccagtgttcataactgacggaaagtctacgaggaatcctacccatctcacgtgccgaaatgtcgcaatcatcatgccgtacgcgctcacagtgatgggtggattaactccaatcgacgtagtatctgtcgtctcagtgtccggtgaacggctagtcgtcaacgcctcttcagtatacgctcctaagggggtcacaattaagtgggagcctatctgtcctctcatttggaccacttacgcggacatagtttggagatggccgtactggccatactcactgtgacagccctcgtgataattccggaggacgtccctaccatcccttatgtgtcgcttatatcgatatcttcaatcaaagcggcacacgacagcctacgttcgggagagctaccacagtggaatccataccttggtggtggtttccctttagccccgactccgtactacctcctccacgcgctcggtagaacggggttgataatagcaatattactgttatcggttttagttctattactagcatcaaatgtaaacaatatgttgcgcgtggtgataacattaccggcagtattattgtccttgatcattccctctccgttaccactgatattggcttcatacgcgctaggtttcatcgggaacaacccgctgttgagaaccgttggttccatagggatacctgacgtggcgctgagcatcgagctggggatccgaaacccttcgctcccggtgctactggcctcatctgcgtgcctcgtggattgcctcgtggccaccttcggcgctgtcccgttgttgacctcacgtccgggtcctatccctcttctattaattctgttaataactgtagtggccatcctaccagcactgatggctctagcaatgctgggtagaatctacccggactaccgctggaagttttcgggaattaccgccattattctcttcggagttcaaacgtacctacatgagcttccaacagccttagcaaccccaataatactattttctttacttgttctcaaaaattttaacactcatcttgataggcgaatctcagtaagattaaacagagtctcgaaaccactgcgattcctaactgctttaatgttagtcctattcttcatcgtgatctgtagcgtcctcgctaccccacgtttcgccgtggtaggatacaaagtagtggggtccaggacgggaatggaatacatcatttcctccgatccgtggttctctgagtgcgttaagcgtgtgctctccggccatccaatctggaacactcccctaccgacggaccctcatatgggccccgcctccctgctaggttacgaactaggagatccacgggccgtccctcctctctatcccacgaagcagctcgaggtccaaccgagagtggtagcaccactcatttcttcaccatcgagctgggccgaaacctctcttcacgctcttcagctggcggaggcggtcgcctcacgtggggcctctgtcggagaacctcgactcaacactcccaccgagatccgcgggtacgggttggtgggtcaggtctacgatctctggtggaagggaggtactcataggggtcttctcctgcaagtaaacggtcgggccgtttacgagcgaccttcagcttggccctcagtggttctgacgctgatgagtatcgcagtggcggctattgagacggctaagagaaagagcgacactgtgtaagctcggctttggtgtcgttcccatgccacgtagtgtagtgtggtgtgttttccgtcggtcttgacgagcatgtaggggccgatgggacaggtttgaccctcccgaccgtccaccgcccagaacggagcccaagcccaaggaacaaccacgaatcgatgaccccgcgaatccaacacgtacctatcgttcgacacccggtgtagagcgtcatgaattgggctgagcttcacgcacgactccttgaccagtttcttgactattggagagtgtagcgggtggtgtacgggacctagaacgtggacgtggtgtgttatcctcctcagtcgccgcactaccttcgacgggggttcagcgtcgaaagccctactggagtaaactacgatcacttctttcgcttcttttgccagcttctcagtttcaggatagctcagcgcctctgagtctactatgagtatatctcccgaccacggtatttgctcggcggataatgactgcccacgttctacattatacggtcgtatcagcggtatcatcggaaagtgtccggtgggagcacttctaactaagttaagccacaaaaagctataatcagtgtatgatcctatgtatatcactttgacacttgtcattggaattatatcccacaatgacagtgttggtttttgactgaaagtgaatccaacgatgtcggagtagcttctaatagtcttaatatcggctccataatctacacttgttagcggtaagagagtcaaaactttgcgtgcgatatcttcatcaaaaaggtgacgctgacctggatgtgctagttgttcacagcattctctaccgccgctattgaggaataaaatagaagacagtattcgtgagcttacttcggagcatccttggtaaaatgcacctcctaaaatgtatgttggacgttcagataatgtgcttaatgggcatgctaatgagaataatcctaaatgggcattggatgccctataatcatgcgaaacgattgcaggtgaggaaaactcgtattcaacaacaattggaatcattggtgtggggcttataacttttaatatgatgcctacgctaacaagagcaaatattgcagaatatgttgtgagagacaattttatcttagagaatattttgggggtgattacaattatgagtgtgcacgctattagcggcattctgtacatatcaagttgtgttaatatctttgatatactcaatatgatataatgaatcttaggtgatagaaatactgctagtccaaataacggaattaatcctattgttccaattacaaacttcttcttgtgtgaaatattaagcaagagtagtgataaaaatgtcattgaagtgacgactatagtcgctagtatggtatcgtacacgtcaaatattgaaaaacccatcgttgtagattcaggcaaattatcgaattctaacttacctacactactagcgaataataatactggaaaagtcactattataggtaggaagaaaatgggactgtctaaaatcccagctactatcagaggaggaatagagtaaatgaaatttgaatataatgaagctgtccatagtacgaaactaaacattctcttaattggatctttcaattttgagttccatataataactgctatcgctgctagtgaataagacatcgtagtagctattctaatgtatttaacctcgtaaagaattgcgataggatataatgctaagtatgctagtaatgcgatagttgcctcggcagagttgagattgagtatttgcaatatgatccacgcgattatcggagctaatcgtaaaagttcttctccaatacaagttgctagaaagatatcctttaccaaaaatttatggattactactggcaccatgaatggtaatatggggtaattagctaaaggtggtcgtcctaaatatgaatacggatcccaatcagaaccacttaatccatatttttctatcagatatgatttgagtgattgtattgctaaatctaagtagataatatgtttgcctaaatctggtgcctcatattctactatgaaattaaggataattatcattacaatagccagaatggttgtaattctgatttccatgtaaatacacccgagtatgcattctcgggtagcatacagattatgttccagtttccttgtatgagtactacttcgatacctttaattacttcgcctcttccttttgctactacgaggctattacgtgtcggaattaaaagtaaatctttttcaattttaacaacatctatgcaagggaatgataaacaaatagggtttgacgaaataccatagtaggtgacaatcggattatcagaggattttgttaagttgtcatagtttagtgtaggcaacattgtaacaggtgcgccgatactgatcactcctacacgcttcaagccatatagcattatttgtctacagttcactacagttcgtgttggaagataagtattaattgcaggtcctagaacactagggtactggagtgttttaagaagatcatgttcatcaaaatatgggtatgtaactttcccttttactatttggtatctcggaatagaggccgcgtaagcgttcaccagtgcaagtgttgcgatcacccctgcggcgatggttttaatttgtttagtacccaccatgccgtcacctccaatgttactgccgaagctactgcgactgagaattgtaacgctacgctcggcagaggtacgataggccaggcttgatacttgtaccaggcgacgagggcgttgattgttgcggtgatgagagccccggagagaacagctagacgcggtgacatcggatctattaacgtccgtaggagccaggcgaccgtagtcgatgccgagtaggcgacatcggcccactgatcgatcccaacgaagatcaccgcaagagcggaaccgagggcgtacagaactatcagtgcgtccgtgactccgtatgcgaggaagatcggggcaccggtgaagtacgcgtacaagttccctggaacgggtatcgccagcccatatactaggaccgctacgggggtaaggtacccgagcgagtacagctgaatgagggctcttgccggtcgcttggcgatcacgtagatggcggccagaaaaggtaagctggtgattatcgtgttaatcgtcaccacggtctcgggactcagcatacagcggtcctccggcgattttctccgtaatttcccggatgcaaatccgtaaggcgcgacccgtgtcgtcctctcggagtgcctcctcgagttccttctctcggtcgagctttaaggacttcctcctatgcctcgcgaggttctcggcgatttctttcagcaccttctcgccggtgatccggtaaagggctaggagggctgcttcggcggcaaggctgaattccggtggcgtccaaggtatcttggcgaacactagtacgaacgcgaggattatcgtaaataagacgatgagtggagcgagcgtcagcacgatggctgcgattagcacggggaggacgaagaacaggaagaacagataggcgaggattctaacggcctcacccgcttcgatcttcatgttcagatcacccactcatcctcgaggtcccgctcggcttccttaccgggagccacccgaacacccttgaggttgcaaccacacacctcggcatcatgacccagcacacacccgtcgagccgtgcgttctcgatcttacacccttcggctacgatggtgttgcggacctcagagtcgatgatctctacatcgtctaggatgacggagttctcgattactgatccgttaatttctgtcctctcacccacgtacacgtacggtccgatctctgaggatcggagctcggtcatcggtgcggctactaccggtggcttcaagtcggtatcggtgatccgtgctcctaccacggacttcccagaacattcatgctccatcagaacgcgatgtgcttcgaggtaagtttcggggaggcccacgtccacccagtatccttcgaacttgaacccgtatagcaggccttcctcggcgagtttcgggaagatctcgcgctcgatcgatacggggcgcccttcgggtatgtagtccagcacctcccggtccagcacgtacgcgccggcattgatgaggttcgagggagcctcctccggctcgggcttctcgacgaagtcgaggatgcggtcgtcatcgtccaggtccactacaccgaagcgtgagacttcgtcttcgggtactggatacagggctatcgtggcgatcccgtcgtgctcacggtggaacttcaacatctggcgtacgtcgagcgaggagactatgtccccgttgaacgctacgaaggcgtcggccgtggagtctcggcacgcgaacttgatcgcaccggcggtgtcgagtggcttgggttctaccttcaggtgaagcttcctggggaggggatcggactcgacgtaccgctcgagcttctcggagctgaaaccggcggcgatgtgaacgtgaacgacgtcacggggtagggagcggatcacccactcgatgagcggcttacccaggatgggaaccaggggtttaggcgtatcccaggtcagggggcgcagtcttgtgccgaacccgcccgcgagcaccaccgcgtccacgttcaacgttcgacctcccctgacgcgctacacgtggttccaccagcttcgtgcttccgtggtgtccacgggaccgtaagcctcgtcgaccaggaggtacagcacggggagggtctcgacgggcgcgttcgggtcttcgggatcgacgtcgagcccgaggtcctcgggccgtacgacggtggcttcgccaccggatcgctcttcgatcaaatccgcgcccttctcgttcaggcacaagtaaagcctttcggagtgatcaccgaagaatctaccgtggaagagctcgtcggaggtcgtcgcgaaggcgttcacgtcccctacctcgatcgactttagcgcggcctgctccgcggcgacgtacaggtacttgtcaccgatgaagaacaccttctcacgatcccgcatctcgagaattacgtcctccggaacgccgcgctccaggcggcgttccaccctatcggggacgtcggggtccacgaggtcctcgcccgagagttccgaagcgtaggcgcacaacgcgaacatagccgacacgatggtgcgggtgttgaggaaaccttcctcgcgctctaccgggaggagtagcaggtagtcggcgagatcggccagtggagagttctcctcacaggtaacggccaggatttcgcaacccaaggcacgggcgatcgagtgggaatctttacccccggacatcgaaactacgatcgcgagatcggctccatcagcccaagccgccagccgtcccggatgcgataccgtcgcgatgttcagctcgtgggtgaacagtagcgaggcgtagtgagccacgtggtgactactacctgagcccgtagtaagtatgaactgataagatgataatcggggtaaatcctcaaatcctagggtgagcactgccctcagatcatccggggttctctccacgtcatccctcatgtgctcgctcaagcagtacaccccaggttacccgattattcatccagtaattccagagtgtggcggcggcgataccgaaaagggccgaagcgatataataaatatggagaagctcggtcagcgtccataggaccgctgtgttgatcaccagaccgccggcacagatgatgttgaaggccgcgagacgctttaggaagttcagcagaccggggtctcgacggtccctccacgtccatagatcgttgaggatgaagttcgatattatggaaacttcaacggcgatgatgttcgacacgacgtagtagatcccgacgacctccgtgaggaaccacaggaggcctaaattgacgaacactccggagagaccgacgagtgagaactttaggaacctctccgggccgtcgacgcccggcgttcgctccagtatgcggaacaggatcttcaaagcccatcacccgggggtcgatcgatggggaagttgttcggcactttcggagtccggggtgttgtgggcgaggatctcactgaggacgtcgcccgaaggttgggactcgcgttcggaacgtacctcggaggtgacgcggaagtcctcgtcggcggtgacacccggaccagcaccgacactctcaaggatgctctgatctcggggctaaccgccgcgggctgcgacgtcgtcgatgtggggatcgcaccgactccggccgtgcagtacctggtggacgccgaggggttcgacgccggcgccgtggtgacggcgtcgcacaacccgcccgagttcaacggtatcaagctgttgggctcggacgggtgcggattgtccagggaagatgagcaggaaatcgagaggatttacttcgaggagaacccggatcgggcctcgtgggatcgtgtgggtaaccgggtttcggcgccggacctgctcctgaacttcgaggaggccgtactcgattacgtgggtgacttcgacggagagggtctgcgagtcgttgtcgacgcggcgaacggcgcggcgtcgtcggtcacgccgcgactcctctcggagctcggtgtcgaggtgatcagtgtcaacgcacatccggacgggcggttccccggacgtgagcccgagccgtcggaggagaacctggagactacgatgaacatggtgagagcggccggcgcggacttcgggttagcccacgacggggatgctgatcgactgattctcatcacgggtgacggcgagttcgtccccggggactactcgctggcgatcgtggcggcgtgggcgctcgacgagggtaaggggagtcaggtagtcaccccggtcagctcctcgatgtgcgtacagaaggtggtagaggaccgcggtggagaggtgatctggacgaaggtgggagagcccgtcgtcgtggaggagctcaagcgggcggaggatcccgcactgggtggtgaggagaacggtggaataatctacccggacttccacctctcccggaacggaatcatcaccgccttgctgatctgtaagctggtcgccgaggtgggatcgctcgacgacctactggccgaggtgcccaagtaccacctgcacaagaccggtgtggagtgccccgacgatctcaagccgaaggtcatggagcgtgtcgaatcgctggtcgaagaggaggagttggaggatgtcctgacgatcgacggcgtgaagttgttctacgaggatggttgggtgctcgtacggccttcgggcacggagcctttgatcagggtcttcggagaagcgcgagatcgagagaccgccatcaggcgggtggagcactggaaggaacgcgtcgaggagatcgtctcggagctgaaggggtagctggatggagcggctggaatggcgtgaatcctcaccggcggagttcttcgagcggaaccgcgagatgctcgggttcgacggacccatcaagagcatggtgatgaccgtccacgagctcgtcaccaactcgatggacgcgtgccacctgaaccgcatacgtcccgacgtgcgggtggtgatccgacgcgaggaggagaacgtgtatcgggtgcgagtgatcgacaacgggccggggatcccgccggagcgcgtgccgaaggtgttcggtaagttcctcgcgggagataagttcgaccccgtctacgggatccagtcgatgggccagcaggggatcggagccgccggcgtcgccctctacgccctgatcaccacgggcgaacccgtgcgcgtgctcacatccaccgacggtagaaccgcgcactacttcgaggtcaagcccgatccctcgaccaacgagccggtggtcgtccggcgggagaagcgacccgcgagccgccgcgggacgacggtggaggtgaccatcggggacgccgtctacgagtcgggtcgccgcggtccccgggagtaccttcgtaggctgcacgcggtgaacccccacgcccggatctccctccgcgaccccgacggtaacgcgcacgtctgggagccgctggtcgaggaactccccgacccacctcgagtgctgaagcctcatcctcacgccctcgacgcccacaagctcctccggatcgccgagcggacgtcccggaggaccgtccgaacgatgctcgtcggggagctctgcaggttctcggaggcccgggtcgaagagctccgggagcgactggcgggccgtgtggatctggagaaggacccgaaggagttgacccgcgaggaggccgagctcatcgtgaaggcgctgcacgagatggacttcatgcgcccgccgtccgacgtcgtttccccggtcggagagtcggcgctgaaggccgcgctgaaatcggagggagctcgactggtctcggcggtttctcggcggccgctcgtactgcgcgataacgtgatccaggtcgaggtggccgtgggttacggggaggagggggatctgtggcggttcgcgaacagggctccgttgatgttcagggcgggcggttgttccatcaccaagggcgtcgaggaggtggatttcggccggtacggtctcgaggaggatcggttactgatcctggtgaacgtgaactccccgttcgttccgttcagcgggcccgctaagcaggagatcggtagcgaatacgtcgaagaggaagtaaagcgggcggtacagcgggcgtgtcgggagctgggtcgtgaggtccgacggcgacgtcgggcccgtctcgagcgccagaagatgaaaaggatcgataggaacctgagaatcgtgaggaagaaggccatcgagatactctcgtgatgagctcacgacggggagacctagtcgggatgatcgacccctagcaggctgaaacggcgcgggtggaggtagccggcggggagcgcgggcttcagacccgagccgatgatccgccggatgccgcgaccgcgccacacttccttctcctattgttacgtatcttgaaacgtttccgtgcgggtcaggggcgggagtactcttcatcggtccgcggcttgcatgatcatcatccctggttcgaggcgaatctccatcgataaaacttcgtccctcgtagggtcaggagggcgtcacttgcccgtccacgcggtcgtgggcttcgggtaccccaagtacgacccggtgagctggttcgcggagcgttcactgatcgagacactggaagtgaagaccgcggagtcccgctgcctcgagctacgcgaggggtcgactcttcgcctcgaggcccggcgcctcggtaggcgtgagatgagcgcgaccgcgctgctggaacgcgtcgaagaaccgggagaagtccacgtgttcgcctcgtcctcgctgaagggacagacggtcgatggtgacacggtggaggatcgtatgggtgagtacctcgtcgatccgttgaacgatgtggggttcgaggtcgaggtccactggtcgtcggcgttcgatcccctgtcgctcctccccgagctcatcgacaccctgacacgtctcgacgatcgcgtggtgctggatcttacccacggtgttcgtatccagcccgcgatctcggccgtggcgggaatggcggccgctcgattgccgggctcagatatggagctcgttccggtgtacggggccgcaggggttgaggtgagggaggtcctgaggtggtcggacggtgcggacgggtctcgcgggatcatcctggacatccgtcgccacttggagtccgccatggcgttcaacaaggtcgtcgattacaccttggatccctcccgagaacacctcgaagagctgtgcgagctgactgaaagcgcgcttcgagagttggacgtccccgatgatcgactggagagagttcgggagctagtgatcgatgaaggggctctgagaggcctcgccgacgccctccggtccaactacccgcggaaggtcgtgaaggaggcgagaaagtgggaaccgaagtcgcccgaggacgtactcgacaggcttcatatagaaagttccgggagggagcgggccgagaagtacctccgtgcgctctcgaacttcttagcaagggccctgaatccgttccttcagggtcttgacttaccgaagtctccttggaaggcggccgtacagctcgccgagtggctgtgtgatcgcggttactacgcggcctcggttctgctgctccgagagctcgtgtacctcaggacggtctacgagtgggccgaggagcacggccacggggagctgaaggaggtcgtcgaagagtacctcagggccctcatcgatccggacgcgagaaaacccaggggagtctacgacgagttgtgcagcaccatcgaagaggttaccgacggggaggccggggatcccgacgatttggtcaggaagatcgaacgggagatactcaaccgatgatctctttcactttcttcaccagattctgtgccttctcgtctggcctcccaacgtcttcccttacgtgtgcgaatgagttacggacatccctgatttcacacaccacctcgataagctctcgccggtcgatcgaatagtcgatttcccttctcttcccccggaagagaccgatcacggccggacccccgcgacgtcaggcatcctcggcgttagacccgcttcgatcttcggaagatacgacagtgtgagatgtgctcgttcggcgtggttcgggaggtggctgtgaatgggttcacgactcatcggaccggaattgttacaaatttaataacgatttgggatttggcgccgcggcccggacttgaaccggggaccacgggatatctgcggccctctcttcatcgggccttaacagtcccgcgctctacctactgagctgccgcggcctcaatcccgagccatctggaaacctcccttacaaaaatataatgctttcggggggaggtccatggccgacccgagggtgagagtgaaagtcgtaggagtggagaaagaggacgtcaggaagcgccttacattgctgcgcccggagcgcgatgtcgacgtgatagtggatggagtgtccggagtgatgcgtgtgacctcggggactacccgcctacgcgtcaacgccggcggctccgcgttcctctcgtgttcgggtaggatctcggaggatgcagcggcagtggcttcagtgctcctctcggaaatcggcgcggaccggaaggagattccgaggttcctttcggcggcggtggagctggggagaactacaccggggggatgcgagctggcggcggttctgcggggtaaggacgtgaccgtgaagttccggagggaccccaagtccggccgatacgcgctgaaatctagacacggggtgctggtcaggcggacccgatcgacgtgtgaggtggagatcctcgtcacggtaacggatctcgatcgggtcgtccggaaggcgggaaggatctggggacagctggaagatttggcgggtggtggagatccagaatacgtcctcctaaacgtcctcgacgcactggggaggtgaggcgactgagttgggtcctagagatgatcaggacgcttctgtgcatgtatgtaggggttctgatcgcgtcttacttagggtcctccgaagcgtgtacccggtcgttgctccgcgtactgaagcctgtggtcgggtccggcctctacggtcacgccgcgtcgctatcggccctgagttcctctgtggcgctttacgcggctcaggacaaggtgaactccaccagagaggccgtgggtttactgctcctcctggccttcccgacttccgtagcgacggtccttcagttttacctccccgtggtcgtacccgccgtgggcccggcgggtctccttatgatcggcatatcggtcgtgggcgccctactcacttccgcgttcggccgtgttctactacctggccgtgaagatggtgatgggccgagtaagatcacgctcgtgcggaacccttggcgcactgcccatagtgtgttcctcagggttgggcccgccgtcgccttggcgatggtggcggttaagctgggtgaggggtacggcgtgacggagtgggtcgagagatttcttcacccgttgactaggtccgttggactcccttcggacgcgtctctggtggtgttcgggtgtctgatcaacgtggccgtaggtgccgccttaggggcagatctctgggcgtccgggaagctgcggatggaggatctggcgctcgcgttggcgttcggtagggccctttctttgccgaggattaaccttcagttcctgtttcctcctgccgtcacgttccttggcaagaaggggttgctcggggcgaccgtccgcacgctcgtcgagaccttggcgaacatatcggtggtactggcactaacggcgtttgttcactagggccctgttttttcgtcggggtttccttcggctcgtacccggccgcccagatcagggcgcgcgccagtagcttccaggctcccgtgcgttcggtcagttccgggtgcacgcccagtaagacgaaccgaccccgtggttcccacttgtcgcccttcttcacgttgtaccagccgagcaccatcgcccaaccactgacgagttcgacgtactttccgaacccctgtacgttgatcctgacctctttcccgtctagccagcacactttgtaccatctgttgtcggagatgaacaccgacccgtcttccgcggccatcccgggaccgttcgcgtagtaatactcgtagaccttcccccaggtggactgcggggtgatggggttctgctggatcagcacggagacgtacccgttcccccggttgccgtcgatcgccgttacgccgtccaccacgagatcctcgccgatggctcctcggtgcgtcactccggcgtgtaggtacgcacccgcgcagatgccgacgtacccgatgccgaggtcgatctgcgcgtgatatagcaggtcgatccagtcgggatcccagtgccactcgggatggtacccgcccggaacgtagatcacgtcgatgtgggtgcctgtgtacggatctcgtccggtctccaggacggtcctccagtccgacggtgatgcgtaggtgatcacgttaatgtgataggtgccggcgtagttcgcgttccagtactcgatggccctcagcgagctttccacgcagttggacgcggctccgtctcccgcccacatggcgacgttcaccatcgtcgatgagacaggggctaggagcgtcacgatcgccgtcagtgcgggggtccacctcacgttaacaccccctcactccgcagccgggatcgttaatcaaactacgggaaacacgttacaccggtaggggacgtgtcgtgtccttgaggtcgaaactggccgacttggccggactcctcgcgctcaaggcggttcggttcgggcccggtatggggcggagctttcccggatggaccgtgatcaaggtcggcggcttcgacgccgttcgcgagctcgcacggcggccggagtacggagtggtgctgattacaggtaccaacggtaagaccacgaccaccagactcgcctgtgcgctcctagccgaagatgcggaggtttcgtgcaactacgatagtaacacaatcaacgccgtcacgacgggcctactcaagggtaggaaggccgagctcgtggtgacggagtacgggattcgcagccgtgagtacgggattccagataccgtctgcgagctcgtggacccgctggcgatcgcgtacacaactatctcgaaggaacacttccgggagaacgcggacaagaaggacccgttcggggcgtacttcgaggcgaagcgtctcctggcgaggcccctgaaggacggtgtgctggtgctcaacgcggatgatcctcgggtcacctacatccgcgacgagaagcgcggtgaccccgtggagtacgttttctacggtttggaggttgaaatcgaggatctgacgccaccgaccgaagagctcgagtgtcccgcgtgcggcggcgagttggactacgagacccgctactttaaccataagggactgtactcgtgtcgagactgcgagttctcacggcctgacccggacgtcgccgtggtaaggctaaagggcggcccggacgagtgggaggtcacgctgtcgtacgatgtgaccaacgccgtgatcggagaacgactggagggaaaggtcacctatgagctaccgctgcccggtctccataacgtctacaacagcgtttgcgcgatctccctgtacctcgcggttaccccccggcccgaggacccggagggaacgatccgacgggtgatcgaagggttgaacccgctcgagttcattccgtcgggcaggttcgaggtgctgaacgtgggtggtaagcccgtcggcgtcggtcagggagacaacggggacgccttcaaggccaacgcgaacctgatgctttcggtggcgggggatgtaggggcctgtgtgtataccaccccggacgagggtgaacatccgatcttcgagatgcacaggattatcctccgagctctcgaaccagacgagctatacgtgtttcctggtagggagtccgtgaaggccgcggaagagtactacgaggaactgaccgaggagttcgacgcagagttctaccctatcccgcacgagcggatgcaggagaaagtcgaggagatgcgtagggtgtgtgaggaggcggatggtcccgtgttcgcctccgggtgcgggccggagcgcgagatgtgggaagccctgaagagggagctcaggggcggctgaatggggctgaggcgcctcctggggctagtcggggtcgggttgatcgttctgtacttcactctactttccgcagagtattcggagtttcaacgcttcctcggtgatccgtggggaagagccgtttacgtcaagttacacaacccggacatcgctccgggtaccccgcacatccgaaccctggtcgacttcgccaaacagcacgggtactccaagatcctcgtgatccacaacgccgggaagatcggatacagtcacttctggtatcacgggatactcatcatccagctggggtggtacgactaccgcacggtcttcgcacaacccgagttggggttggtgatggaggacatcctctacggtcaacgccctatgttgggtatctggatcgcggatcggcgtgaataccgtagtatgagtgaagctgtaaaccacgtgcgcgacctggagtcggccgttcccggacgtacgatggtggtatggcacggatcgtgtcgtaacggtaacccactttggaacctcggatgtggtgcggaaccgtacttctggatcctctcggcgtacggtgggcgtgtcctcgcacttaccttcgccgttttaggtaacttcgcccctatcgtcttctacggggatgcggcgctggcggagctcaggaactacgacaagctccaggcgctgtacaacagcgggaccttgaaccgctacgccgtagatccttacctccgcaagaagccgatgccgatgggaccgcggggcgtgtacgactgagagggggtgaggccggtgctggagccgctcgcggaatatcactcgatcgatgacgatgaactcgcggcccggttcatggtagcacggaccctcccggtcgaaaccacggagggggagttagaggacctgtggaaggagcacgaggaagctatggaggaatttcgcgcgaggtgggaggagcgtcccgcacccggagatatcgaggagacctcgccgaacctcctagacttgaagctggagatcgctcggaagatcctccgtgaatgcacgttctgcgagcggaggtgtcgggtcgatcgaacccgtgaggacgggttctgtcgggttccgatcaaacccaggatttcctcggagttcctgcatatgggcgaagaacgcgtgctcgtgccttctcacacagtgttcttctgcgggtgtacgttccgatgtgtctattgtcagaactgggacatagccttccgaccgaccaacggggtatacgttaaaccggagtcactcgcccgggtgatccggcatcgacgatctcaaggtgccaagaacgtgaactgggtcggaggagaccccacaccgaacattcactacatcctggaggtgctcaggcggctcgacgtgaacgtcccgcaggtttggaactccaacatgtacttgaccgaggaggccatgaggctgttagacggcgttatcgacctgtacctgacggatttcaagtacggcaacgacgagtgcgcggagaggtactcgaacgccccgaattactgggagatagtgacccggaaccaccgtgaagcggatcggcagtgtggcctgatcgtgcgtcacctcgttttacccggtaacgtggagtgctgtacgtttccgatcctggagtggatcgccgaagagctgggtacggacacgccgttgaacgtgatgccccagtatcgcccggagcaccgcgcgtacgagtacccggagataaacaggcgaccgtccgcggacgaactggaagaggcgtgggagaaggcgagggagctggggttccgatactaccggctttagagggattcgtgaactttacccggttccggtaggccgagctccttccgctcctcgatctccttctggttcttgttcttcttcacctgggcgagcttttgaatgagaccgagacctggcttgacctcctcgatgctcttaacctccagcagaccctgctccaccatgtcgtcgaggatctccttggccttctccgtccgcacgatcacggtgctccagccgtccggtgaacccaccgagccggcggttagatcggagagctcggcgcagtaatccgtgcacacgtggcacggttcaccctcgaaggggtgcgtttcgtcgatcgggatcgacttcacctcgccgtccttcgtgtacacccagaacttaccgttaccgatgtccatcttggtgacctcacgtatccacacgccgcagagctgctcgatgatggtcttcataccctcgtacgggaagttctccatgcagatgatccctatcagtagctcgatcttgtccggaacgtgcctcatcccgatcgggcagagctgtgccttacggacggcccggatctgacacggagtcccgaccatcgctactttctcgcaaccgtagctcctcacggcctccttgaggacgctcacgttgggacagtacgtgtacttggttccggctgcctccaggacctcgtccgggtcggtgatgaccactgggcgtggcttccaaggctcctcggggtcgtccgggtccgcgacggcggcgatcacgccgtcgaacagtccctcttcaaggccgtagatcatgacggcggaggcgatacctccgtcctgggtgaccttcgtgaccttgcgctcggtcgagcgggccgtgaacacgccgaggtggtctcccagcagctctggatcgcccttaaccatgatctcatccaacttgctcatggttactcaccccccatgattagctccttgatggcctcgtcacccggccagatcgtcctcgggcactgcgtgaagcacgcaccacacttgatgcaccggttctcgttcaccaccggtctgccgtccacgatctcgatcgcccgcgtggggcaggccgccgcgcaggtgccgcatcccatgcacatgctcttgttcaccacgtggtacatcaggtcgcagccgcagtactccgtcttaccttccgccagcttcgcgaacggctcgagcagctcctctttaccctccagaaggagcgtcaggaaccgcttgatagcctcgggggctggtggacatcccgggacggcgtagtcgacgtccgccacctccgtgagtggcacgaacgcctcgtgcgtgggagccgcctgctggttcccccgcgagagtcgcatgaagttccccgtactcgcgcacgcacctagtgccacgatcgtgtcggcgtgctcctccagctcctccacttcctccagcatgtgctcgtcgttaaggcacaccgcaccttctactacggccacgtcgcactcggggatctcgcgctcgtccatgagggtctgacagtagaccagctcgatggagtccagtatatccaaaagccgctcgtacgtgtcggttaacgacaccagacacccgcagcatccggccagctgcacgtaggccacatcgcatgatgacctcggcgtactcttcgttttcgccctcgatagccttctccaccatcggaccaacccaacacccccgaaggggaagaaaggtgggaagaacgggaacgtcgggaacgtagggtcaagggtgccaagggtgaggtgaggaaaccggccccccacgtggggggcggtcgcgccgcgggtccccgtttcggggttccccgcggcggtcatcccgatagtcggttttaggcgagcttaactaccgactcccggatcttctcccgggagtcggcgtcgcggacttccttcaccacgtgagcggcacacgatgctcatatgtcgtaacatcgcatgatgacctcggcgtactcttcgttttcgccctcgatagccttctccaccaccgggaagttccacgtggaagccgcgatgatgcgatagtcctcgacgatacccttctcgttcaccttagcgatgtgcacgttggtgccccgtggggcctcgtgaactccgattccgactcctgccttcggctcccactcggccagggtcttgccgctggtgttgagttcatccaggatcgtcatcgcccggtcgatggccgcgagtgtttcctgtgaccttaacacgtggatgtacaggactccgcgtgggtccaccccgtcgaagagtatgtacctggctctgggtccgacttccaccggaacaccgtcgtaaagcgggatctggccccggtgctggtacgcgacttccttgtgctcctctccgtagtactcgatcggaagcagctccaccacgcggtccatgtccagccggtcgggatccccataggtgggatgcgtcgccaggaacggctggtcgtgtctgccgaactcgtcgatgtcgaggtcgttctcgtcgccgaacctctcgacgatgttcaccatgaactcgtgctgctccatcatcagctcgcgcgcctcacgtagcctgcggtaaagcttcctacgcgcggcttccgagatgttctcggccatccctccgatcctgatgttgggtggatggattccctcacctccgaccacgtccaccacgtactgtccgatccgcctgatctgctggatcctcttgaccgcctcgaccttctcgctctcatcctcaacgaaatcgtccagtactagcaactgatggagcacgtgagactgaatcctgttacccagggcgcagagttcccgcaggagtttcccgtccttgggaggttcgatgcccatggcccgctcgaaggcctcggcggatgcggttccgtgcgtcgcctggcagattccgcagatcctcataacggccacctgaacgaactccgcgggccttcccttcgccagcgcttcgaagcctcggaccgccgaagtgttcaggtaaaacgcacgctccacgtaaccctcgtcgtcgacatataatactagcttagcgtgaccttcatgtctcgtggtcggttgaatctccacggcaccttccgccaacgcctcacccccatcggcccgtcccgacggccacggaagaagaacataaaactcgggtgtgttcagtgatcgagtagaggcacatttaacggttgaataccctgtccgtccgacgacgagagggttacgcggattgagtcaaagtgtcttgatagtagacgcgctgggcgcagggaaggggtggaggactagatccagagacgttatcggggcgggtcctaggaccgtcgcatcgctactggaaagtgattatgaagtatcgttgattacttatgaagatctgcagaaattaggactagatagtgttatggattacgataccgtaggtgtcagtataatgaccggcgacgagcgggccgcccggaggatgttcgaccacacacgttctcggacgtttcggttcatcggtggtcccggagccgccgatccgaacgcactcctcaagactggagccgacgcggccgtgatcggtgaagccgaggagaccctacctgaactcttggaggagcgtggacccgtccgcggcgtgtacttccggaggggaaccgaggtggactttccgggtcctaggcccatttccaggcgattcacccgggtcaatccggagtacatccgtgcctacgcacaccgatgggccgcacgcgtttacgtcgagatcgtccgcgggtgcagcaactcctgcaggacgaccttcgaactgcccgacggccgcaaatgttcgggatgtgggaactgtcgggagggtgaaggtggggagcgatgggaatgtcccgaaggtattccaccgggttgcgggttctgttcggtaccctcgatcttcgggccgaccaggtcgagaccgttgaacgaagtggtgcgggaagtacgggggctcgtccgggaggggatccgtcgggtagttctcagcgcctccgacgtactggattacggtcggggcgacttactgactgatcctcggactccgcccccgaacgtcgaggccttaaggcgcctcctgcgacgaacatcgaagcatgtggacgtgctcttcgtcgagaacgtgaaagcgtgcttattgaaccgtgagatcgcggagctcctcggtgagtactgccgcggtacctcggtgagcgtaggtgtggagacgggagacccgaggctgctccgcgcgatcgggaaaccctccacgttgaaggaggcgttgcgtgcgatccgtctcctgcggagggccggtttacggcctcatgcctacttcgtgtacggactacccgggcagacgatgaagtccgcgaaactcacggctaaagccatgaaacgagccgtcgagatgggagccgagaagatcaccgtgtacaggttccgaccgattcccgcctcggccttcggagatttccctccgggtcccagtccacgtaacgacgaggcgagccggctcattgcggacacggcgcgtcgtttgaacgaggcgctgaaacgtaggatgatcggcaagagaatccgcgtatacgtcgccgagcccgacctacgccggcctcgggacgcgataggttggccggtgaaaggtggtccgaaggttcggcttaagggagctcgggagttagtcggcacggaatgtgaggtagaaatcacgggagtagtgtcggacaaggtggtctcgggtaaagtagtgaggatactggaagagatcgacgtggaggcgttagagggacgaggggttcctggctgaagtcgggtagtacgggacgtaggtgtaccaccgcgcgagccaccacagatggcaaggtccgcgtccgggtctgcccgggccaccgcgccatctgccccgtcctctccacctcatcgttaggtgcccctaatggacgggtttcgggaaaacgttaaacgtttcggtcctcgccgcccccgggccgtggtgagaattcctttagccgacgctcggatgacgagtactccccaggccgagcctccgtcggactccaatcccccacgtccgaacgctccatagcgtactccgctaccgccttgatgatctcagcgtaatccacggtattcgagcgtgtaccacaccggggacacacgagcctgacggactcgggatcctctccgtcgagagtgggtggattcccgcactcgggacatctcaggtgtcggacgaaccggaacaccgggcatccccgaccgcgctcgcacctcgtgcacaggtggtactcccgggcgcagggtacctccgcgttgagagcgggctcaaggtcgacggagagccccaggtggggctcgatcaccgccgcgtcgacgtccaactcccggacgaaccacgggtcgtaggcgatcaagtgcacgggtaccacgatccgaggcttcgccttccggcacagcagttccaaacccactcggtccaggtgcccgggcacgccggaacactccgagatcagaacgtccgcccgcggtagacgggcgtctaagaacgtctcggggctcacatcacccgtgaagagcacccggataccgtccagttccaccaggtacgccacggcgcccggacagtggccggtttccacggtttccaccacgatctcacaccggttcggatcctcgggtctgtagtcaaacctccgctcgattctctcggccgcaccggggtgcgcgaagggttccccgtactcgcccccgtgtttggcgtgatccgtatgatgatgtgtgaccagggtgtaatcgggatagggctccccgaaccgtgagaacaggcccggtgccgacttcaggtcctcgggtagttcggcccacggaggcacccttctgttgtacccgggacgccaaccacccggatcgaacaggacctcgatgtccgtcagagagatacccacgaccgcacccggagtagccccgaacaaccggaccggtgaccagatcttgagcttcatccacctaccccagtgcgctctcgatagcggcggcgagctccgccacacgctccggaggtagatggagcggacgctcggatagtaggtcctccgggagctcttccagtacctctcgagcctgctcgcgatcggtcgcccactcgtgagcggagaggagtaacgcgttcctcaccgttttgttcttgtgctggaagagggctcgacacacggattccaaggtgtccggatccacatcggggcgctcctcctccgacttgggcgtcaggcggaccacggaggagcccacgcgcgggggagggatgaaggccctgcggggtacccctctgaggagctccacgtccgcgagcaggttcaccatcacggtgaggcggctgtacttcttggatccgggttcggccaccattcgctcggcgaactcccgttggtaggtcaacaccgcgacgtcgatgtccagctccaggagcttgaacgtgatcggagacgagatgttgtaggggatgttggctacgaccttgttcacgtcgtccggaacgtcgtactccaagaagtcggcccgtacgatctcgaggttgggggcctcaccgagctcccgctttagaatctccaccatgcgtccgtcgagctcgacggcgatcacttgacccgctcgggtcatcaggtaacgggtcaggagaccgggtccggggcctatttctaacactatgtcgtcctcgcgtacctccgccgcctccaccatgaactccaggatattatcgtctaccatgaagtgctggcccaagcgtcgcctgggacggatcccgtacttggatcgcaggtacgcgaggtactcaacgcttctcaacgccgacggacaccctcggtcccaggacgtctacggtgacgactgttctcgggtcgttcaagttaacctcgcgaccgacggatgtaagtacgtcccctatgaacacctcggcttcacgtgaggaggagaacgccccggctcgtgcgatccgggccctgacggcgaaggggtcgaggatgcgaggttcgatgtcctcgaggatcctttccctgagctcgtcacggtcgaactcgccgctgatcaggaaccgtctgatacggaacacggggagctcttccttaaggagctcgacggcttcgtcggggtcgcccctggtcaccattatctcgactcgacctgagaggttctcgggggctggggcgatatcggcgtcgaatccacgccccgtcagcaggcaataaactcgggcggctacgtcctcctcggtgagataggggttacccccgaacgtcaggagcacgtccaaccggtccaccgggtcgtagcctaacggctcatcggggtggacctccaccacctccacgccgctcctggccaggtagtagggaccgagacctcggcctcggccgaggtatacgacgcccgccacaccggcttccgcgagttcccgagcgcaatagaggcacggtctggcggtcacgaagaccacctttccttcgacgtcgtgtcgtcgtactaacttacgctcggcatgctcgtcgtcggcttcctcgacggctacgatctctccgccctccagcaaggccgctgtgaccgtgcgtttcggaatttcgttcaggatcttcttcacatccaccgtttgccccgctaggctcaccttcataacgtcgctcccctgtaactaccacagggagattcgagatgccggagcgcctgtacgttagggactacatggtcgtaggtgtcgctcaggtccggatgacggacaccgtacgagacgccgttcgtgagatggcccgggccggcgtacatggattggccgttgtgggccttgacggtgagctggtcggagtgctagaagaagagcacataatggatctcgtggtggagcggaggggagattgggcggatatcctcgagacgcctgtcgagaaggtgatgaaccctgaaccggctatcgtgtagccgggcgacactctcctcgacgcactggaggagatggagcgcaagaagaccactcgagctttcgtggtgagctgtgaaggaacgcccgtcggcgtcatcagtgtcacggatatcctgagtgcgatcattcagagctgattatcggcagtatacgctcctccgccatcttcgccacggtgaggtaggtatccagcgacacgggaagctccggtgctgagcctagctggctgggtatccgcgggtgctccggggtcaccgggtgccggtcgtgaatctcctccccgagggtcaaagctagctcttcgacgcgcaggcccatcctcctagtatcttcttcgaacacctccaccaccctcacatcggtgtcctcccgtacacactcggttacccaaccttcgcattcctcacgcgtgcacagcagtatgacgtcctctacgcctaatttctcgaaggcctccatctgcgtccagaagacgtagtgacactcgcccttctcgtccttccagagtttcctcttggaccgcttggtccgtcgctgtaggaaccacatgtacgagaaatcgaacaagggtacgttcaggagggccgacaagaagtgtgcgtacaaactgctctggatatccacgtatcccaccgcgaggtctgagctcctccatcctatctcggccgtgatcccgtcgacaccccaagccatgacccttgggaggtacttccagttgagccaccacactttcacatcttccggtattttcttgagcgagatcactctgtttgcggggatcgcatcgagttcgacgatctcccggccaacgcgcaggtaaggcgaaacgacggtatcggcttctacttcctccaccaggttcgttggagacgaaaccgcgttcctcgcggcgcaaaccgtcgctgtcttggccagtgcgagcgcgaacagtgcccgtttcagttcggtacggccgaacacgtacgagatgcggcccatcgagtactccagctcgagtaacgtgggtgagtcgacctcgaaaatcggtgggatcgcgacctccgacggggcctcctcgcgtcggctcgtcgagaccgataactcacgaagcctgcgcctgaactcacggaccgcggacagtaggcggtcctccagtccgcgctccggctcttcttccctctcgacgtggacccggatctccatcggcccttcggcaacccgaggtgagatcgttacgttctctggaacgttaaggcggacttccatggactcgtccttcgagagtatcaggagatgttctccgtgccagacgactcggcaaccctcgggtaccttgatttcggcggagtcgagagagtcaaaggcgcgagagaggcaggcgaccagattaagtacggggttatcggcctcctccatccctgaacagcccggcccttatcaacccttgatcaatttgacgacttcgcccacacgacggccggtattacgcgccgtttcgatacccgtttcatcctcctccacgtctccgggctcgagtcctacgcccgcaccaccgaagtgcgccgtggggtccgagtctccgaccacgatcatggcgtggatcatgaagaagttctggatgtcccgtagtgtgtgctcctgacctccgttacgggcacctcctatggcgatggctcccccgactttgtctttcaactcccaatttatcctcagtgggcgtgttctatctatcagcgccttcagttgcgcactcacgccgccgtagtacacgggggagcccacgatcatcccgtcacactcgcgcatcagctcgtaaacgtcctgcatgtcgtcatctatggcgcactcgcccgtttccagacactcgccacacgcttcgcagggggagatatccagatctcgcacggtgatgaactccgtctcctcaccggacacctcctccgcggcctcgagggcgatcctcacgaggtactccgtgttcccttcccgcgggctcccggagatgcctaaaatcatcctacgtcgcacccccggggtttcgagttgagacgcgtcgtgatactatggaacccggacgacccagcctctaaaaacatcgcggaaagcctgaccgaggacgccgaaaagctcgataccgaggatctccaacactacaccgtcgaaacctgggaacgtgacggtgtccgcttccacctgaccgccgccctcggcgatctcatcgaggaggacgaggcacgggaactcgcccgtaagttcgacgtcatcgtgttcgcctcacgccacgagagcaggacgaagaagccctcactcaccgtgcacgtacccggcaacccgacccccgaggccaagttcggtggtaagccgctggaggtctgtacggccgatccggcgggtatgaaggccgccctcctcgagctcaagcgtttccgggacaagcgtggcctggattacgacgtctgctacgaggtaacgcaccatggaccccgcgatccgggggctccctgcttcttcatcgagatcggttccgacgaggagcgctggacggacgaagaggccggagaggcgtgcgcccgcgcgatactcgcggccgtcgatccacccgacgtcaaagccgtggtcggctacggcggtggacactacgctcccgcccataccgacgcggccctctccaatcggaagctcgcttacggtcacatagtgccggactacgccgtcgatcacgactacctacgcgatcagttccgcgaggtggtcgacaaaacccctagagcccgcgagattatcgtcgacgaccgtaacctcgattccgggatcgtggagcggctcgaggatctcgtccgcgatcgcggtctccgtctccgtgacgtcgaggaggtgaagtgagtgatccgccgcgggcagaacctcgagggtccgccgggccgataccgacggatcggtgcggtcgtccgagtcggtccttacgcccttttcctcaccgtccgtggcccgagacccgctcctaagaaggtccgcgtcgacgggatccgctgtccattactccgcgaagaacccgggctcaacgtcgccgtttacgccttcgagttccccgagatcgtcaaaccggacgagatcgccgaacccgagctcggtgaggccacactcgaagccggggacgagtatccctgccgtatcgaggatgtcgacaggaacaacctccggatcaccatcccctcctacctcccacggcccggcgacgccggcgccccgatagtccagaacgaccgcgtcgtcggtatgctcgcctcctattggctcaacgatatgctcggaatggggccccgcgccgacgtcgccctccgcgagatcgtcgattacctccgccgtcggacccgcagctccaccgcgtagtggtccaacgccggggagaaactcttcacgcgccgtacttccagtacctcgccctcaaaaccatccggcagcgcgttcagcacttctcgggccacccggtcctctccccatcgcttctggaacacctcgtgtacgaccaggactccaccgtcccgtaccgcccgacacgcgtacggcaagaacttcagcgtccccttcagataccccatcaacacccggtccgccgcccgcacgaaccgtgccacctctcgacagtcccctaagaacactcgtacccgcccttccacaccgttcagccgcgcgttctccaccaggtaccggcacgccacggggttcagctctgccgctatcacctccgcccccgccagtgccgccggtagcgtgaagtaaccgatcccggcgaacatgtcgaacacaagctttccttccaggtccgattccagcagccggcggcgctcctccaggttcccccgtgcgaacatcacccgcgtcgggtccaacttgaaccggattcccagctcccggtgcacggtttccgcgttccgatcccccgctacgacctccccaaccggctctcgaaacgttccactcacgcggcgtagcgccaccaccgatcgcgccccggtcacctcacggaggatccgtcccacctcccgtcggtacgcccacgcccgctcgtcgaacaaccggatgactaccacatcgcccagctcctgccaacggtgtggtaccgagtccgcgacatccggcagttcctcctccagtctccgcgcgaactcctcgcgggacagcacttcatccccccgccagctcggccgccagtcgcaacgcccgtgcgtaacccgacgcccgctgcgctcgtgaggtatccacgaacaccacacctcgttcgagcgccgccagcaccggtgccccatgactccggaagcccgccaccagcgacaggcaccggaacgtcaggttccccagcaccccgttcacgaacagtacgacgtcacgttccagtgcttcctccaccagaattccgacgtgttccacctccatcccgcgctccttcaacagccgcgcgaccaactccccgtccgccaaccacctgtcgatctccgaccgcctaccgaagtcctccagtcgtcccgaggacaccactgcgaccgacggttccctccgagtcagccgtcggtggaacctcgcggccagctcccctaacttcaccaaggattccacctcccatccctcgtcgatccccaccggggccagcagcacccgtcgaccctccgcttcgagcaccgtcgaccggcccgtgaacggtaggtccagtgcgtcgacaagctcccgtacacaccgtcccgataccgccccccgcaccgccgcgtccaacctaccctcgacgaggtcctccaccaacgcccgccccgggtccttcgcgcgtacttcctccacatccgcgtcgagctcgacgttgtggtacaccacgacgtccacgtccgcgcgttccacggcttccagcacgcgctccgcggcaccaggcacgtcgccggacagcgctatcccgaccctcatacggacacccccggcgacctccacccctcccggagaacttaccgtccacggtccgacagcgaccggctcgggcacgcgaccgcgctccctgatgaccgtccggggcgcccctccgacgcgtggctgaacgtcacacgtctccgtgcgtcacgacggcatcgctattaaccggcgggcccacccgggacctcccgggagggtgaggagagacggccctggccgacgtcgatgaggaggctcgggcaattccgacggcctcgccctctcggattccctcgagaggcgacggtcggtagtaccacttacgtacggcttccgcacggtcgtcgaaggaccgtatggtggtctacgtattaccatccggctatcgtcgtatagtgggtgcgatctaccactacggtctacgtacggctcgcataccgtcggcgcatcgtcgtccgacggttacgggacggttgggtcggtgaagggcatcgcagcgaccgccctgccgaccgtccgaaacgccacgtgtttggcggaaaaggaacctgtttctgaaatctattcgcgttggagccggtgtagtcccaggattggcggtacgatgagttcttcagaggatctcccagcgtcggtcgaacgcgttccactggagatgaacgcgacgtcttcgggctttccggatgatccgctcggtttcttcgggcccctcggtctcggccgcggtggccgcaccgtggaccgcccaaccgtcgccgaacagggaaccgtcgggaagcggtgtcgcacggtaccgggttgcgagactccagagtcgaccgaatggatagcgatcgggtgggttacgagccacgacggtgggaatgccctcgggaccggtcagctcgaggccgagctcgacggccttcatcacggtctccggctccacgtcgacgagtagcacggcggctaggagcaggcggtgtcggtacaccagcatagcgtgcggtcggaggtcgagggtgagacggcgctggaggaagcgatcgaggaacgtcgccgctacccttcgagcttccggcggcggttccccctcgatcctgtccctccaaacccgggaatcacgccgcagcaggattcgaaacaggagggctccccccacggagcggtggacgttttaacgtccgaggtcacggggcgccgggggtgcgtgcgatgtcgcgggtggttctcgcgtattcaggaggcttggatacctcggtttgcatcgagctcctgcgggagcggtacgggtacgacgaggtgatcacggtgaccgcggacgtgggtcagccggaggaggagctgcgggaggcggaggagaaggcacggaagctcgcggatgagcacttcacggtcgactgtgtggacgagttcgtgtgtgagtactgctggcgagccgtgaaggcgaacgcgacgtacgaggggtaccctctgagcacggcgctggcccgaccgctgatcgcgcagaaggtcctggaagtggcgcgtgatgtggacgcggacgcggtcgcacacgggtgcacggggaagggcaacgaccagttccggttcgagtcgtatttgcgggcgcacggcggtgaggagttcgagatcgtggctccggttcgggacctgaacctcacgcgcgacgaggagatcgcgtacgccgaggagcggggtatccccgtcccggtggacgtcgacagtccctacagcgtggacgagaacctatggggtcgatcgatcgagggcggcgtcctggaggacccctccgaggaaccgccggaggaggtcttcgagtggaccgtcagtcccgcggaggccccggacgagcccgaggtcgtggagatcgagttcgaggacggcgtgcccgtggaggtggacgggcgggacgacccggtcgagatcgtccggtacctgaacgagaccgcgggcgagcacggcgtgggtcgcatcgatatcatcgaggaccgggtgatcgggctgaagtcacgcgaggtgtacgaggcaccggcggcggtgacgctgctcgaggcgcaccgggcgctggaggcgttcaccctgacacgccgggagctgtcgctgaaggcctcgctggaggaggagtgggcgcgactcgtctacgacgggctgtggttcaaccccctgcgcgagcacctggaggccttcttcgactcgacgcagcggcacgtggaggggaccgtgcgcgtgaagctgttcaagggctccgcgaccgtgatctcacgggagtccccgcgagcgctctacgaggaggagttgatatcgtacgaagaaaagcagttcgatcagcggacggccgaaggagccgtgaagcttcacggactccaggaacggttggctttaaggcgtcgtgggtgaggctcggcgcgctccgttccggtcatccccgcggtccccgatgccgccttcctcatccgaacgtcacccggcgttacaggtgctcccgtatcctgtcgtacagcatcgcgcccgtcgcgatgaacaccgtcgcgaacaccaccaggacggcgatgtcgacggggtccaggtaacccaggagggccgccttcctggcggcgtcccccatgtagtacatcgggttcacccgcgcgacctcgtaggcccactccggcatgacgctgggtggcatgaagatccccgacaggaacatcatcggggtcgtcagcgccccggtgagcatctcggcgacttccgaccgacccgccagcgacgccatcagcagggcgaacccgatcatggtggcggtggacaggatccccacacccagcaggaggaacgggtgcggcaccttcgcgcccagggcgagcgccgtcaccagcacgatcccgcagcggacggccccccagaggctcatgttgaggaacctgcctatcacgacgtccctgggccttatcggggcggcgaacagcgcgtaggtgacgccggtctctatctcctccatcatgacgcgacccatgccgaagatcgaccccatggtggccgtcagcaccaccagtcccggcaccaggaagtcgaagtacttgagccccttcaccggcgcctcgaagtcgaacgggttcccgggcactctcgagatcggcggctggggcgccggcatccagcggaaggcggcctggaggtcgcgcacgaccttcttcatctcctccgagacgcgcttgacccaggcgcgctggatgacgccccgcacgtagttcgatcccatggggtccgaggggtcgtagtacacggtggccttatccgacgggaaccccttcggaacgtacacgaagacgacggccctgccctccttgaccatcgtcttaccctcgtcgacgctccggacgtggacgacgcccacccggtcgtcggacttcagggcgtcgaggacggggtcgaaatcggagctgtggctcaggacggctacggtcacatgcctgggcttgacgtcgtggaacgcgccgtacatcaccaggatcgtgatcacgggcatgatcagagtgggcgcgagcctcctgcggtccttgagccaggccctcagatcgcggacggctatcactcgccaggacaagaggcgaccccctcgtaagcctcgagcacggaaccgtgacgctccatcacctcgtcgaagggctcgtcgagctccttgcgaccttcgaggaagatcagcacccggtcgggtctcagctgctcgacctcgtagacgtcgtgggagacgtacagtacggtggtcccgcggcggtggaactccttcgtcacccgtatcacgtccctacgcgccatgggatcgagctcgttcgtgggttcgtccaggacgagcacctccggctccagagcgagggtgatggcgatcgcggcgcgcttccgcataccgccggagagctgccccgccttcctgtccatgaaccgatccacctcgagcatctccaggggctcggggtccggctcccgaccgtacagcttggagtagaaccggaggttctcccggacggtctgctcggggtacagaccgccctgctgcgggacgataccgaccctgcgcttgatctcggggtcggccggatcgccccccagcacctcgatgcggcccgaggtgggacgcgtgacaccgcagacgatcttgatgaacgtggacttaccggcgccgttgggccccaggatggccaccaactcccccgcctctatctccacggacacgtcgcgcagcgccacgacctcgccgtactccttcctgaggtcctccgcgacgatggcgggcggcatcctagatacccccgaaccggcgccggtcattccttcaggaaggtttcacacccttcacgccgagggaaccggagggtagcgatggggtcacctcgacgtagaccgaggccgtaaatgctcacacatcccacggcgatatgtcgggttttagggcgcgctacgtcccgtgcctcagcctccagtgttcgagttctaaccccacgtcggggatctcgtacctcccgtcgagggacctctttctagaacggatcaccttgcggaggtggatcgagtagtgggcgggccatcccccgagggtcctgatcaagaacgactcgagtcgatcggggagttcctcgagtagatcccggattcttggtgactcggagggtctcgcgttgaaggcgaggctcagtccgcgggcgagcacccttcgagcccgtttgtatggcaagtccgagacttcggcgagtagtgtcttgaggaccgagcggaggttcctcatgaggtgtcgcgcgagctcgaggacctctccccgatccagtgagaccaaccactcgacgaaccggacgctctcgttctcgggcttacccaggtagagcgtgcgcccgtgcttgaaccgcgagtccctccgccagcgggccacgtagtacgggccgcacgtgctcccgcccatcgtccggtacgtgacctcgagactgggcttcttcccacgacggtaagcctctcggagtactcggagtgcccggatcctttccacggggtccgagggtatcgggacgtgagcgtgcgacgtgatcaaccccggtacgtaatcccccgatgtgcctccgagttgtatggaggcaggggtgaagcggcacctcaggatataagtcttgtcgtctcccacggaggttcccgacttctgccatacaactttactcgctcgggaaagcgaccggtcgcggcggggcggtttagaaccccctcggaaaaattactgcgggaaacggtccggcaagcgtctcccccctacgcggacgggagctccactccacttcgttataattgatttaaactagtcaggaatctcgacaccggactttctgtaaggaaaatagcacttcgggggaagagtaattgaaagctcaaataccgaaattttacgccttatgttacccactaatgtattcgatttcgggctttattatagctacacttaccgccttaaatgtggcgattccgagagtcttctggagtatacttttaagcttatatgtgatatcacacgtcggtatcgttacgataataatccttatatccaagctgatatcacccagtagaaagcgtaagttttacagaacactggcctttgtatatgctgtactgggcttcattccacccttcgcctggctcctcggcgggttcgcctgccaccggattaacctggatctccgcgagcgaggttgcgcatcggagcgacacacgcccaggtacgccgtactgacgatcttgaccctcggactctaccagtcctactggtggtacgtaaccaccgaggacgtcaaccgctgcctccgacgcgagtaagatgttggctcggtcgcgccgactctttccccggacgatggaccgtcgggagatcgtggataaggcctatcgctgttccatacaatagaaacttcggacacagttgcggagggtcgacgtggactgtcgtcgagtcaccggcttcgagttctactcgtcgatgagctcacaccgcgtcttccagtttcgttcccttactgagaaggtcgcgctcccacgacctcacgtccgatacacgttccgccccgggacacgtcccgtacgggggagtgtcacccgcctcgatgagcgtcggtcggacggaacacgtacccccggtttccacgatccacccgttcggtcgtactgtctaccgcgggctgacattctcattgtaacgttaacgattcgaccgttacttttcatcggaagggaaactctttttacccttcgaacggtggggcgacgtgcgaaccactcggcggctagcccccttcccactggggggaggcaggtgagccgtcgggtggtcaccatcccggcgctgatcgtactcttcacggtcttgggacccgtcgcggccggtcccgtgaacctgtcccagaccagcggtggagagcgcgttatcgtcgccttcaaccccgatgacccgaacgcgtggtccgcagtccatcgacaccctgtaggactcgagcgcggaccctgggccggcaacttctacgacgcgcgctgtttcccgaacgaggttactacgcacggtaccaagttcgtcttcgagaaatccggtgggctagtgtacggactgaaggtagaacccggtgattcgatcaccctacccgaacccgcgagcgtggtgtccgtcgcgtacgcggccgtatgctggtgggaaaacggacaacccttcaagcgcgtcacgctgatagtggaagactcacacggtcgtcaagccaccaccagtctaaccctcgcggactggtgcgcccgcgcgttctcaccacacgccccagaccacaacttcctcgtttgcgagttcgaccaccggctgagcgtcgaggagcggaagatacgcttcttcatcattcccatagggatcacctggaagtggcgcgttgcaggtctgaagtgcggcgtatgggccttccggttgagcgcgagcgagctgggcctccgtgacatcacgaggatcgagttccgatacggagatgggcacctgtacatcctcgcagtcaccatcaccccgaccggaccgttcgacgacatcgtgggcgggccgaactgctcgggtaccacggtcggcccggacggcatggacgaggtgggctcgtgctactgggagggtgagtggccggcgaggttcggccacacgaccgtgaccgcgaacggcgtgcccttcctgatcccacccgcgagcggcccgaacgcgctcctggcgaacgggcgactggtcgagctcccgcgacctgctcgcacggtctggttcctctacgcggccacgaactggtggttcggggataagccgtacggacccgtggacctcgtcgtggtggacgatcggggtaggaccgtcaccgcgcgcgtgctcctggtggactggtgtgcgcacgacgtagttcccaacaacatcgaggtcctggcgttcaaccaccgcgcgatcccaggtggcctacagtccatacactgtggcgtgtgggcgttcgagctcgatgcgggccagctcggtctcccgaacatcaaggccgtgtacttcccgagcatggggcggcggaaggtctggatcctcggcgccaccctggacggtcagcccgtcggtctaggggagctcaggccccacaggatctcacacccatggtccgggttcaagaggggtgtcgtgtacccgggcggcgagaccctggacgggaccttcctactaccctcggaatgtagaaaggtacagaggacgccgatcgagggcctagcggacggtaacgccgagcggcctctcgaactcgaggaccgaggacgggagcgtcatctacgtacccgtgggtaacgatatcgtcccgatcgagctccatacgcgcgctttcgacgcggttggaacccgaataatcctgcccgaggataagcacgtgactgccgtgtacgtcctctacgcggcgacctgctggtgggacaaggacggcaaccccgtggacgccgttcccatgacggtgtgttacgacgacggcagcgcgtactcgacctcggtgggaatcatcgactggtgcgcgacggatccccgcgcgtacgacgacgagaagcgcagggtcgccgccgcctgtgccgtcctaccccagctcgaggcccactgggtgcggggagaaccgctggtctaccaaacacccaccttggtcttccccaagcgcgtgttcgcggacgggcgggaggagccgaacacgaagcgtccgatcctgtggctgctcaagctcgtgttcccacccgataaacgaccgacctggatcgagttcgggtatcacccgggtcacctctgggttctagcgatcaccgtgcgcacgacggacgggaagtactacgcgttggacaaggacggtcgcagggacctcggcgagccagagcaaaaggtcgtcctggaacctaacggtggcgaactacttaccgcagacaccagcggttcgctctttgggacttccgtcaaggtgaccgcggaatggtgctggccgaagaacgcacaggttgaagctctgaatctcaagttcgagtggcctttgacaacgaccgccctaggcagtgccttgtcggtgaccgtccgcgtaccgtcgggtcatctactccgcgacgctatcccaactcccgatgactggtaccttaaatggctaagggaccaattgagggatgagataatcagatcggccgataacgagctccgctcgctgtccctttctgaggaggaaaaggagatcgcacgccgctgcatcgagtatagcgccaacttgaccgccaacacggcccggggtgacgcgttcgccgccctcaccctcgtggcgctgtacgaccggctggcctcgcggatcgcggagaagctcggcgtccacgtttatcgagccgtcccagcgtacgtgaccgtcctgaccgcctggcgggccgatctttgggcaatcctcgaacacgtaaacgagcggatatccaagcactcgaaagtgttaacgtcgttagcgcttccgaagggatacgacaccctcaggcacattgccttcacgcagttcctaatctatcaacccaccctgggtctggaagtgtacggaccatccctcgaggcccgagccgtcaacgcggtactctccctactactcccgggtctcgagcagacgatcctcgagatcggcaggggagcctcggtagccgaaggagatcgggtcgatgtcgattggcaggaagtccgggacaagctggggaacaatctgagagaaatcgggatcaaggatcccgaaggtaccgcgcaggagatcgtcgaggccttaaagtacctgaccgagttagtgaagtacgaggacatggacgagcggctgaagtccgcgggcgttcagaggtacgtcgatcccttcctcgaacgcgttcctgttatcttcaaccgcacccctagcctcgaggcggcggtactatcttacacggacgtggccacgtggacgaccacgatctacacgctcttccccgttccgagcaaaggtgcgagtactccctccggttgcttctgcggtccaatgaccgataacctgaagaggttctggaatagcttggctgacagcatcttatacttcctagcttaccacgccctaggaaacgccgctatttcattagcaatttcgcttctcattggcggtgcaataggagaaatagcagccggcgtgctgacgcctgtcattgtagcggcaattaaggccgggtactttaacgattggagtgactggaacaagctaaaaatgttcgcaaatgagactgcgagcactgcccccgcctcctttaccgcaaaactgcagtgggccatccactgttatgggggaggtagggcgaaagccatagcgacgacggtctctttcgcttttgcttacctatcgagcgtttgtaccggggcgaaactgccgtagggggctctcgggtgggtgatccttgggaggagttggaacgcttctcagacccggaattactcgaattctccaagcgcctcgacgtcgaactctccggagaagagttgaaagccactaaaaggcgggttgagcacgttgagtcactgaaaattaagtgtataatagtcattccgatactcgctcttgtagggttagctataaatggtaaaatgctttccatcctcgccagcatttattatgagtatcctgcttacgcgctaacgcacgccgcagcagtcctagcctgggatgtcgccgttatctacatgctccgaccggggttatacaggaaggaaaagcgcgcgctcgagctcgccctacgtgtcaaaaagcccgtgctcgcatatttttcactttaccaccccttgacggcgccattggctgggtttatcatactgatattctcctcgtacaagccattacatatcctatataagaaccctaaaggagctataataatggtgatagcgtatcatgttcagatatttataccgttaatatcatatcttgtacttagactaacaagaacccctgtaatactatcatacagcttgatagtgactaaatttgcagttggacgaccggtggccgtcgagaaactctggcaagaggctcgcgaatatcgaccgttaacgttaccccgagtagcgttcatcggggtctccctcgcgtcgaccataggcatgctcctactcataggcttggttagattgcttcacatcgagtactctaccaagggtatagaaacgatcgcccgaatggctccattagtaacgttaggagtgactccaatagtcactgtcaaagcgcgtaacttactcgctagggtaccaccgacgacaatcgcagagggaatcttgacagccctcaacgtactggccgcgttcacgtataccatcccctttttcgtgattctactgtattattgcctcccgtgaagttaatactggagacttcatcacagtggaccaaccccgtgtaacccgagtgggtgatcttgggaggagttggagcgttcttccgacccggaactccgatccccacgccgacgtctgagcggcatccggtggatcggaaccgcgcgtcaaccgaacggtgtccgccaggaatccctcaacgttcggtaagaatgtttatgcatcaattaccacaaatactcttactagtatcacactatttatgtattgtctactggtgatcatccgataatagtaatacaatcgttcaggtttggtggagagtgtgaaggacgttaaagtgggggaatcagtgtatccgtagcccagcccgttcaacaccagttataaccccgaacgtgagggaacgcgttcccgtaggaacgggcggggagagcccaccgcgatgtccgtactcggtaagaacgttcacccactatccatcggaagttgtattgctgatatcacattatctacgaatcgtctacgtatgactattcgacgatggtaatacgatcgttcaaaattagcggcgggtacgagggaggttaaccctgagaacgcgtaccggtgaattaaccggttcgatccctgtcttgacgtgctcctacggcgcgtctcatgtcgtgattatcgatgggagatcccggaggccggcgcggtcacccgaccctccgttccaacgccctgcggaacgcctccgccagctcctcctcgtaccccaccaggtacaccgccctcacgctctccagctcgggtgccagcctctcgatgacctcgaccatggtctccgcggcgtcctcgtacggtacgccgcccactcccgtgcccatccccgggaacgcgaccgactcgacgccgagttcttcggccttccggagcgcggcctccgtggcctcgcgcacgttctcgacgccgatcctctgggccggccgttccatggtgggggcgtggatcacgtactcggcgtcgagatcacccgccgtggtctcgacggcctctccgaccgggatgagcgccttctccatcgcctcccgctcgatctcctccccacctttcgccttgatggccgccgctacgccacctcccatgacgccgcggctgttggcggggttgacgacggcgtcggcgttgagctcggttatatcccctcttaaaacgacgacctttatatcctccaattcgaactcggcgaccctctcaagctccatgcgatccgcccccgggcctcggcaaccccgtcgtctcctcacatctcggctggcacggtggtccccatcggcctcgggccccgtcgtactcgtcagcgggtttcctcggcagggacaatgctcgtcaccggcccggacgcgcccggtgatcgggcgcgccctcgagacgacgttctcgccggcccggttgggggacggcgggtcgcccttccccgggttaggggacgcccgtcggcggtccttcccgggtgtgcccggcggcttgcccgccccctcatcccgcccggagcgggccgtcggggacggcctcgaccggtgtgaccgggctaccgacgggccggatcaccgggggcggcgggggaggccgcccgatcctgaccggccgtactcccgaaccggtgaacggccttaaaccgtgttcggtccgcgcgctccccgtccgggggagtgatcgggtggatccttggtcggcgttggccgtcatgatggggtgcttcgtcgggttccacttcctctcggaactgctcgtggacgccacggtcggcctcgcccggaaatacggtctctcggagtcggtcgccggggccaccctcgcggcgatcgggaccagcgcacccgagttcggctcctcgctgagctcgatcctgctcgaacacccgaacgtgggtgtgggtaccatcctcggatcggccgtgtacaacgtcaccgtcatacccgggctcgcggcgctcgccgcgggcggtctgaccctcgagcgtgccgtgtaccgtcgagacgtcctcttctacctcctcgcgctcgtggtcgtgctcgtcagtctctgggaccgggtggtcctccgcgtcgaggcgctcgcgtgggtggcgttgtacgggctctacgtcctcctcatgagacggaccgacgagagtaccatcggggccgagggcgacaccggcgaggcctcgctgcggagcctcgtcgtccgggtatcggtggccgtggtcgggatcgcggcgctctccgacctgatggtccgggcgaccgtcgacttctgcgaggggttcggtctgtccgagtcgagggtgagcctgctcctgaacgccgcgggcacgtcggtgcccgacaccctggcctcggtgcacgcggcccgtcggggtttcgggagcctggcggtctcgaacgccgtcgggagcaacacgttcgacctcctcgtctgtttgggggttccactgtcgctcgtgtcccggacaccggtccacggggagttgggggcgacggtgctggcgctggtcggctgcgtggtgctcctgtacctggtcacggtggacgggaagcttcgcaacgtggaggcgctggcgctgctgggggcgtacgccgcgttcgtggcgtgcttactggtattataagagaggaaccttcgacgtacccgggcacttgaagactcccggtccctagtaggcccaccggaaccgcgcacccctgagggtcggtgctaactaataccccccacctcacggagaggaggggtgcggggcccgcggaaccgatggggagtcgtaccatgtccgatggtgcactccgcgagtgggaggggcgaacctgggaggaggtggacgggaaggtacggtgtttggtgtgcccgcggaagtgcgtgatccccgagggggagcgggggttctgtcgcgtccgggagaaccgggacggcgagctcgtcttgctgatccacgggaaggtcagtacggcggtcccggaccccatcgagaagaagcccctgttccactacaagccgggtacggacgtgttctccctgggcaccgtcgggtgcaacttccggtgtagacactgtcagaactggcagatcagccaggcggggccggaggaggtcccgctggaggagtggcccccggagcggatcgtcggggccgcgaagcgtaccgggtgcgagagcgtggcgttcacctacaacgaaccgatcatcggcctggagtacacgctcgagaccttcgaggcttgtcgcgaggaggggctagggtgcgtctacgtgaccaacgggttcgcgacgagacggaccgcgaagatactcggcgaggtcctggacgcggccaacgtcgacctcaaggcgttcaccgaggacttctaccgcgacgtcgcgaaggcctggttgaagcccgtcctccgcacgtgcaagatctggaaggatatgggcgtacacgtcgagctgaccaccttggtgattcccgggtacaacgactccgaggaggaagcgcggcggatcgcacgatggatacggaaggagttgggtcccgataccccgtggcacgtgagcaggttccacccggactacaggatgctcgacgtgccgccgacgcccgtcgagaccatcgagaagttcgtcgagataggctacgaggagggcctctactacgtgtacgcgggtaacgttccgggccacaagtacgagaacacgtactgcccggagtgtaaggagccggtcgtggtgcgccgtgggttctcgatagtgaagatgcacgtcaccgacgacttccactgcgagcactgcgacgccgagctacacttcgtgacctgagtcggccaatcgaggcgtcttcatcgcctctccggctccagacggcccacactcgtcatccttccagtgagccttatcgtcggggaccgactcgggggtgtgtgaacgcgttccgtgactccggtggaggtcggggacgcaccgggcggagcgagtttaaggcaggtaccggggcggcggtcggggtgagagcgtgagggcttacctcgagctcgcacggcctatcaactgcgcgatggccgctttgggagtggtcgtgggtgaactgatcgcgggagccaggctcgacgtcggggcggtcctcgcgccggtggtcgccgcggtcgtgtgtgcgggagggaacgccatcaacgactacttcgacgccgaggtcgacgccgtgaacaggccggataggccgatcccgagcggtagggtgtccccacggtcggcccggatgttcgccctcggctgcttcgccgtcggggtcgggatggccaccgtaatcaaccggatgtgtctggcgatcgccgccctgaactccgttctactctacctgtactcgtggcgcctgaaggggactcccttgatcgggaacgtcatggtctcctacctggtgggatcctgcttcctgttcggagccgcggtgggtcagcggccggcgcccgcggtgtggctcttcttactggctttcctggcgaacctggtgcgcgagatcctcaaggacctggaggacgtcgagggggacgcggcgctcggtctcaagacgctcccgatcgcgtacggcgagggggtcgccctccgggtggcgacggtgttcgcgatcgcgctggccgtcctcacgccgctaccctacctggacggtgtcgtcgggtggccgtatctggtcctggccctacccgccgccgcggtcatactcctggcctcggtcctagcggtcgccgggagctgggacgcgggtaaggcgcagcgggtggtcaaggtggggatgctgctggggctgctggccttcctggcgtcactcctctagatcctcgaacctgtcctcgagcttcttcagtacgtccggtagcgtcgtgtactccagctcctcctcggacagcaggtgcggctggaacggtccgtgtctccggatgtagtccgccacctcgttcgcgatctccctcgcccggtcgaacgcggggtccgcgaacaggtcctgcgggccgaccagctctccgttcctcagctggaacccgagcgctatgatccttggtggaccgtcgaacctcgtcgggtgcgcctcctcctccgatacgggcatcagcggaccgttgtggctacccctcatccatccggccacgaggtgcgggaacgtgaacggttcgagcacctcgccgacggcggggaacccgctctggcaccgcacgatggcgaccgggtcgtccttacccacgtactcgccagcgatcaggttcagccgctccgtgctcgtcacggccgcgatgcgctcggcctcgtccccgtctcccttcttgtacacgcgcttgatcgcgtagcgctgggtctgaccgatcagggcgagcagatcgtacatctcctcgggacacttcaggatgaccttcttctggtcgataacgtcgtgaacctcgaactcgaacccgtcgtgcatgctcggatccagcaccagaccggccgtgttgttcgggtccgcgaagatccggaacaggggcaggttgaacgcgctcggctcggtcttgtcgcagcagaacacgatgatcggctcgctcggacgctccaccagctccatctccgccgcgccgggaccgagcccgcgcacgttaccgctgaacgcgtcggacagcaggtcctgaccggcgccgtacagcttcaggtcctccgcgaccttcgtggcctcctggaacgcgttccacgcgagctcgtgcaccttctcgtcgtcctcaccacgcgtgtgcgtcatgatgaggtcgatatcgtcaccgcaccgcgtcacgtagtaatcgatgatcacctcatccacggcatcttcgaggactccctcacaggcctccagaagatccgggtgaacctccgagtgacccgggaaacctcccacgtccgccttgatcacgctcacggtgaccttctcctcggccaccgaaaccaccccctaccgaccggccatcacccgtattaaaaggggcttcggtcactcactcgccctgcaaccgcatgatagcttccgcgaggtccccaccggtctcttcgagtgccttcctagcctcctcctcggagaccccggcctgctccgcgaccaacttcacgtcctcgtccgtgaacggctcctcctccggcttctcccgcttcgccttcccggccacctggtagaactcctggttcatgatcttcatccggatgacctgtggcttctcgaagacgagcttcgaaccgtccttgaggtggatctccacccgttccacgccgctgataggttcctgctccatgcccatctcacgcatgagtctctgcaacttccttgggtcgatcttgccgcctgggaacaattcccgtccccctccctccccgggcgaatccggcgataaaaggattaactagaggcctcgacgcacgcggaccgcgaccccgtgctcgaagtactcgacctcccaccccgagagcctcatcttgcccaccgccagcagctcgtcgtcctccgaaaccactaggcactcgtcccccggtcgaagctcctcccagcctcgaagggcgtactcgcagaagaggtcgcgacccctcctcacggcctcgacccactcgtccgcacagaccacgcggtgctcgggaggctccgtggcggcgtgtaagcgtcgagctccctccggggccagcgagaccagaccgtccgaggccctcacggtgcacaaccttttcccgtccacgaacacctcgcgcgggcgacctcggcgtactcgcaccttcacctcgccgtcgagcatcgcgtccgcggcctcacgcccgaactggtacgccaggatcccacgcacgatctccacgtagcggctcatgggggaacccacccgttggatccggacgtcctcctgaggcacgccgaggagatctccgacgcctgtgtcgtttacgccctcgagggagaactcgtcgagatcgaggcttccaacggggaactccggaaggccgactccgaccgcgtccgcacttacgccgtccgtgttctcaaggaaggctcgtggggagtcgcctccggtcccgaccccgagcgggatctcgttgagcgggctctgcggtccaccggtgagggttccgcggagatccctgaggaggtcccggccgccgagggatcgtaccggtgggaagggaagctctctccgctcgactccctcgacgaggccgccgagctggcggtggagttatcacgtgaggtgtcgtacgactgcgagatcacgtactccgccggctccgtccggtacacgatcacatccacctggggatccgagtgcgaggtccgactcgactgcgtgaacttcggggttaaagtcagcggtaaagggaccgcgggtagggaggagtacacggagcgggacggggctaattgcgcgggtttggagctgttcttggagcgggcggaggaggtcagggacgaagcggtccggaggctcgaggatttgttggaggcggaacccggtccggagcgtgcggagtcggtgatcacggaccccgaactcctcggcgtgatagtccacgaggccttcggacacgccgtcgaaggtgacctcgtcgcgcgcggagaatcggtgcttcaggattgggttggagagcgggttgcctccgaaatcgtgaccgtggtggacgaccccaccgagcgcggtgcgttcggttcttaccccttcgacgacgagggagtcgagcccaggcgaaccgtcctcgtggaggaaggtgtgctgcgaggctacctcaccgacctgacctcggccgcggaactcgaccttgaggtcaccggaaacggccgtttggaatcgatcggtgaccacgtgcaggtccgaatgagcgtaacgtacgtcgagcccggggacgcgtcgcgggaagaactgttcgaggaggcgggtgacggtgccgtctatctcctgggatcgaaaggaggtcagaccgatacggccaccgggaacttccagttctccgccaagctcgggtacgtggtggaagagggtgaaccatcgcgtcccgtccgcgacgtgggtttgacgggtgagaccttggagttcatgaagagagtccggatgctctctgacgagctcaggctccatccggggtactgtggcaagggcggccagttggtgcccgtgtccgacggtgggccacacgcgctcgtggacggccccttccaccttagatcggggtgatggcgttggatgacccgctgtcccagttcgaacccggccgggcggtcctcctcgaggtggagaccgagcgggtcgaagtggaacgcacccacgacacgggtgaccgcggacgggtctccgccgatcgtactatcgtcgtccgcgtgtcgaccgatgggggactcggtgtggcgacggtggccgaccccggagaagtcgacacggcggtcgagcgcgcactcgcatcggccgagatggggacatccgagcccgtcgagtatcccgattccgtcgatcccgcacgtgtgagctcgtgcgatccttccgcggtcgacgaggacgagttgtgggacctcctcgaggcggtcgtgaacgaggtgtctgacgacgtgaccatcacctcggtctcggtcaccggtgtccgtcgtcgtgtgatcttcaggactccttcggaccaggccgagcgtgaggagtcttccgtcaccgtgagtttggacgtcataggcgagttctccgggttcgcttgggataccgccgtcggtccacgggacatcgatccggagctcctcgcccgagaagcctcggagatggcctccgaggcaccgaaggagcgggtaagcggtggcgagctcgccgtcgccttccacccacgggcgttctcggaactcctcacttacgtgctgataccggctctctccgggctcgaggtactgaaaggtaccagcgggttcgatcggggggatatcggtcgtaaggtcggacctgagagcctgcgcgtcgtgaacgatccgacactcgaccgtcggcccggttcctacgcattcgacgacgagggtagtactccgaagcgtatggagctgatctccgatggaatcttgcggtctttctacaccgacctctactcttccaggcggctgggaatggagtctacggggagtggattggggatcaggcgcccggagccgtcgccagcgaatgttatcgtccaaggtgacgcctccgaggaggaggtcctggaagaggcggaccttatcgtatacaggacactcggcgcacacacggcgagtaaggtgagcggacgcttctcggtgaccgcactgtgggcggagaccgtggaaggaagggcggtgccggtatcggttcggggcaacctgtactcgtccctgagggacgccttgatatccgaggagaccgagcgcacgggtgtcgttgaaccaccgtacgcgctgctacgatgccgggtggggtgagtgatcactgtcaatcttgacggtaccgtacgaagaatccaattcacttaactaccggaaccccgccaacaattctcctatgcctaccgccggttaccggcaccggaatagtaactccgcgggggttttagtgaccgggggggggcgaatggggacgtgtagcccgtaccgcgtgtacacccttccgaaagccttcgagcgcttttatgaacctcggtgggggaaattcactcgacgaaatgaccggtggtacttcggcacccttgaattggatccgctgacggaagacgatgtggagttacgggaaataacccttatggtccccatcgccgaggccaatttgatcagtaaccacaagttccggaacaggaagagggacgcggcctacgcctcgtatctggtagggtcgtcatcgacggatgtggacgacgtcatcccggtgacggtcagaatcccgtggcccaaggacgtgaaggcgccacgtgagatgccgttggtaccggggacgctcacgcaccatcgcaggttctgcttcacggttcctaacccgccggaaactaggaagctttccgagaaaacgctcgtcacggcggcgctgctcaggacgctgtcacacgagctcgatctgacgtcagccatccgctactgataagtgcacggcggatccgtcaactccagggttcaccaggtggcggacgtgaaaataggattcgaggtccacgtgcaactcgacacccgcaccaaactcttctgtgactgtcccacggactacgaggacgcggaacctaacgagaacacgtgtcccgtctgcaccggaatgcccggggcgaaacccctcccacccaacgaggaagccctcctgatagccctcgaaatcgcgcatatgctggattgcgagcccgttctggatcgcccgttgtacttccagcggaagcactacgactaccctgacctgccctccgggtaccagcgtaccagcgtgcccatcgcggtcaacggcgagctcgacggtgttcggatccgcgagattcacgtcgaggaggatccgggccgttgggagccctccaccgggcgcgtcgattacaaccggagcggcgtcccgctcatcgagatcgtaaccgagccggacatgcgttccccggaggaggctcgagacttcctgcgtcgtctcatgcaggtcctccggtactcgggtaaggtgaagggtgacggtggcatccgtgtagatgccaacgtctcggtcgaaggcggggccagggtcgagatcaagaacatcaactcgatcaagggcgtgtatcgggccctcaggttcgagatccagcgacaactcaacttgatgaaacatgggcgcgaggtccgccgcgagacccgtgccttccgtgaggatcaaggtaccacggtcgcgatgcgttccaaggagaccgcggaggattacaggtacatcccggatccggacataccggtgttcgagatcaccgaagacctatgggagaaggccgtcgcacgggctccggagccaccgcaccaccgtgccaggcggatggcggaggagtacggtatctcgttggaggccgccgaggccctggtcacggagcgtgagtgggccgatttcttcgaagaggtagtggagaaggccccggatgactgggacatcgagttcatcgaccagtgggtgcgtaaggagatcaagaagatactcaacaagaaggaaatgactttccgtgaagctaagataaccccggaagagttcatcgagctgctcgagctcgttcgtgaggacaagatcacacgccagaacgctctcaacgcgctgtgggaagcggtcgattcagacaagagccccgttgagatcatcgaggagaacggactgctcaaagttagcgatgaggatcggttggcgcgcgtcgtggaggaggtcatcgaggagaacccgcaggcggtggaggattacaaatcgggtaaggaggaagccatccactacctgatgggccaggtgatgcgcaaaaccaggggacaggccgacccggaggtcaccatgcgactcctcagggaaaggctggattccgacggctaacggcgtccctcacatcggaacaccacggtcggggtgtccgggaaagattccgctctcacctccagaaagagccgactgagggctcggtatatcctatcctgccaccgcggatctcgacccgcgaacaccgacgccgtaccctcgtccttcagcttctcggctatcgtccttaggaactcgggagagaacagccgtgggttgcgcccaggacacggtcccccgtcgtgaaccacatgatcgaaacctctcgggagtttcggcacgacttccacggcgtcgcccagtagtatcttgaccctgtcgtccctgagcgcttcggagaactccgggaccgggttccggtacaacgcgatcgcgagcattcgaggatccacttccaccgaaacgatcagttccgggtcaccccacctcaacagcgcccaggtggttctgcccaatcccgtaccgatctccagcaccatgcctcgagcctgctcgggccacgcgatcacgtaccccttgagccccattttcccgacctcgaacccctccttcccgtggcccaatcctcccgtccgttccctcacgtatcggaacagctcctcctcatccaacgactccgcccactcccggtaccgcgcggcggcctcacgcgctctcctgtcttcactgagtaacccgcgaccgatattatcgaccacctctcctacccccatggggaccgctcttgccggaagacccccttcgcggctacgagccttcggtgagggattacttggcccgatgtgacaccgacgaggaggcgctggaggtgctccagtacctggtgaagcggggtgagctggacgaggagcgtgcgtccgaactcgaacgggaaatccgagaaaagggagttagatcgctggtggaacgcaggcacttcggctattacctggagcgctattacgacccggaggaacgaaggtaccgcgggtgagccgacgtgtcatcgggggccgtggagcgatccccggccgtcgcgggtcagttctaccccgccgacccggaggagttgaggaagatgatcgagtggtgcttccgacacgagctaggacccggtgatctacccgagactaacgacggtccctgtaccttgcccggcgtggtggcgccgcacgccggttatcagttctcgggaccggtggccgcccatacgtacaaggttctggcggagtcaggaacccccgagacggtggtgatactgggaccgaatcacaccgggcttgggtccgcggtcgccacgatgacggacggtgcttggcgcacgccgctgggatcggtggagatcgactccgagttcgcgaccgcgctggtacggaagtgcggcgtgatggacgacgacttaacggcccacgctaacgagcactccatcgaagtacagctgccgttcctccagtacgtgtacggggagagtttccggttcgttcccgtctgtatggcgatgcacgaccttcagaccgcgagggaagtaggtgaggcgatcgtggacgtggcggaggagctggataggaacacggtggtcatcgcgagcaccgacttcacgcactacgagccgcacgatcaggcccagaaaaaggatcgtaaggtcatcgaacggatcacggccctcgacgaggccggtatgatcgagatcgtggagcgatacaacgtcagtatgtgcggcgtaggaccgaccgccgcgaccatagtggcggtcaaggccatgggtgcctccgagggggagctcctgaagtacgcgaccagtggagacgtttccggagattactctcaggtggtcggttacgccgctatcgttttccgccgcgggtgacgacggatgcacccgatcgagtcgttggatctagcgttgacggcgctcatcgcgggcttgatcctcacgtcggaggcgctgcgcctcttcccgttcctgtcgtacctcgtcagagtgcccctgaggcctataaccctggtactcgcgctggcggccctcgtactcacattcatcgctcccatcaaggggtacgtcccgacgcttctgactctgctgtgctccgtgccgaagctcagtatcggagggtacctcctcagccgcgtgtggtgggtggtctccggcttgcgtgatggtctgataggagcgctccggctgtccttagagatccggactctacccttcgacctgtcggtaggctgtgcactgacggccagcggggtactaggggtcctccggtggatgacctccgttccggcggtgccgtggtgacgggggcgggaattccgtggagatggagcgtgagttcgaagaggctctcaggaactcgaaaacgttcctgaggtcgatcgaccgggtgatcacggactacccgaagtggcgaaccgtcgtcgtggacttggaggagttcgacgaaccggacatagcgttcgcggtgtccgacgacgtcgtcgaggcgatgaaggtcgtccagcgggttgccatggagctcatcaagaaagagcggccggacgtggatcgtgtctgggtagagttccgtgggtcaccgatccgtctccgtgcccgggatatgagcgtcgagttcaaggatcgtctcgtcaccgtcgaggggatcgttcgtcgcgtggataacgtggccgccgaggtagttcgcgtggaagccgagtgtccgcagtgcggtaatcggttcgaggtccgtaggcgcgagtacagacctgacgtgaggtgtcccaactgcgggatgcggtgcgagcccgacgagctcttctacaccgactatcagctcgtagtgctccaagaagctccagagcacgtgagaggcggtgaacaaccggcgacagtcgaggtggagttccggtacgatcacatcaaccgggtacggcccggtgaccgggtgagggttacggcggtacctcgggtacgacttccgtcgagttctccacgaccgggtgataccggggagatagtcctcgaggcccacggtgtcgagaggtccgacagcccgcttcccgaggaggacctccggttcacgcaggatgaggtcgaacggttcgaggaactggccgagggtgatccattaggtgagttcgtcgaagcggtggcgccccacattcacgggcacgaggtgatcaagaaggccgtgtcgttacagctgttctcctgcgtggaggagggtcagatacgggagcgtgttcacgttctcatcgtaggtgatccggcgacggcgaagtcccagatcctccagcacgtgatcgagcacctcgccccccgcggcgtgtacgtgagcgcccaacacgtgacgggggccggactcaccgcggccgccgaacgtacggaggacgggtggacgctggaagcgggagccgtggtcatggcggacggcggcgtgatagccatcgacgagctggacaaggcgtccaggggcgatctgaacgcgctcctcgaggcgatggagtcgggtaagatcagcgtcgcgaaggccggtatcacgacgaccctgaacgcccgatgcgcggtcctggcggccgccaaccccgaggccggccgctggcagggcggtcaccccatcgaggagatcaacctggaccccgccctcctctcgaggttcgacgtcatcctgttcacccgagacgagccggatccggagcaggataagctggtcgcggaacggatgatggaggctttcgacggcgagttcgatgagatcgagggtaagtacgagctgttacgccgctacgtcctgtacgctacgaaggagtttccgaacgtcaccatctccgaagacgcccgggaggagcttcgagactggttcgtgtccgcccgacaggaggcggctgatcggatcgacgagggagatctacgcaccgtgccggtcacacggcgtcagatgggctccgttctgcgactagcccgagcttccgcccgtatgcgactctctgagacagtcggtcgaggggacgtgtccgtagctctgtcggtagtagaagagttcatgaaggaggtaatgcaggaggacggcgtactggacgcggacgtgatcgagacgggtaaacccaagtcggtgcgagaggtccgtgagtacgtgctgaaggtggtgcggaagctggcgaagaagcacgaggacggtgtacccaagcgggagatcgtgaaggcggttaaacaccgcgtgagccgtgagcgggtcgaggagatcctggacgacctcgtcgaggagggctcccttctccagccgcggcccggagtgtacctcccgatgtgaacgggtggttgaacatgagtgaagaactctctcgcaggtatcctgccgtccgtgtcccggccggcgaactggcgcattccgaacccacggaggatggtttcgtcacgcctagaggtgtcaggtttcacagggctctggtagtcggggtgctctcgggacggtacgtggacgaggagcgggagttcgcagtgatcacggtcaccgacgacacgggttccgtcgacgtgttcgcgttcgatgaatgctacgagcccgcccggacgctcgataagtggaggcagatcaaggtgatcggtcgtccgatggagccacgtgaagagggtcgtcccgtggcgctcagggccgaggtaatccgccttacgtcgtactccgaggagctcttccgcaggttggagtacgagctgatggccgggggcgaggtacctaccgtcgaaaaacccccgacgctcgacgaggcgatcgagatggtgtataaggaactgctcgagagggaggaggaaacgttctcgagggaggaactgtacgaggtcatccgctccgtcgtccccctcgcggacgaggagttctgcgagaagatcattaaagagatggaggagcgcgagctcctgtacccgatggatctgcccggagggaaacgttggtccgtgatagaaaccggctgggggttgtaaaccgtggtcgagtacgactacgaggaactcctcgagcgcgcttacgagcagcttcccgaggaggtgctcgaagatcgccggttcgagatgcccaagccgaaggtctccgtggagggtaagaccacggtcatccgcaacttcaaggagatctccaagaagctcgaccgcgatcccgagcacatcaccaagtacttcctgaaggagctcggtaccgcgggacacgtcgacggtggtagactcatcctgcacggggtttaccatcctaagctcgtcgaggaggagcttaagaactacgtcgaggaattcgtgctatgcccggagtgcgggaaacccgacaccaagctcgtcagagaggatcggcagtggattctcaaatgcgaagcttgcggtgcctggtcctcggttcggaggctgaagtgaatggctcgggtgctcttgaacatccacgggaccggagacaccgtggtcctcgccctatgcgacgaggatctcctgggtgtggagttgaagtacaaagggcgcaccctacatatctccgagcccttctacagtggaaagtccctcgaaccggaccgcgccgcgaagaagatccgggaggccgtccaggagtacgaggacgagaagacagttgcaatcaacgccctaggcgagctcgcttgctccgtcgtcgtcgacgcgggtctcgccagggaggatgagataggggagctgggaggggtcccacacgtccagatctacatcctcccgcgggagccgttcctttgacctcgggagtactgtgcacgaccgctccgggcctcgaggacgtctgtgcccaggaactcggcgagatcaccggaaaatccgtgcgtgagaactacctcggcgtacgcggtcgcgtgctcgtggagtgctcggagcacgaggccctcgacctcgcccgtgagatcaatcgcagatcccttaccgtccaccgagccgcggttctcctgggcggctttgagatcgagcaccgcgacgagcgtggcctcgaggagatacgtgagcgctgccgggaactacctttcgagcgttacatccacgaacacgatacgttcggtgtacggccatcgcggctcggagagcatgatttcaccagcgtggatgtgggggccgccgtcggcgatgccgtcatcgagcggataaagagggaggagggattcagacctcaggtggatctcgacgcgccctcggtgatcgtcagggccgacgtcgtgggagacaccgtcatcgtcggagtctgtacgaccggtgaccgctccctccaccagcgcggttacagggtatacgaccatccggcggcgctcaaccccgtgatcgctcaaggcatgctggagctggccggggacccggactctctcatcgatcccacctgcggtggcgccacggtgcccatagaggccctactcagggacccggagacggaggccgtaggtgtggagaagtttcgaacgcattacgagggagcccgcctcaacgtcctggccgccagagtcgacgtggagctctatctggcggacgcgactcgactgttcgaggaggttccggagctccgagatcgcgagttcgacgccgccgtcttcaaccctccgtacggcctcaagatagcgaacccgcgcgtcgtgaagacgctctaccgaggtctcgcgcgcgttctctcggatctcgtcagtgtcgtcgtgacggtgacgccacgtgacggttggatgcgggcggcgatggaggagtacgggttcaggttgagccacgatcgctgggtgaggcacggtggtctagacgtgaggctcctagtctttcgctaactccctgacgacgtccagtagctcccgtggcctgtcgatttcgaagtccggaacatcgtcgtcgtttctcggctccatatcctggtatttgcccctccggatcctcaccgttaccatccccgcgcggttcgcccccctgatgtccttgtccaatcggtctcccacgtacacggcctcctccggtttgactcccaatctgcgcgccgcttcgatgaagatcttcgggttgggcttctccacgccgatttcctcggagatcaccacctcgtggaagaagtggtgaatacccaatcggatcagcttctcccactgcttcaccgctagcccgctcgtgaccgctcccagcttgaatcccatttcccgcagctgcatcagtgtcgggatcacgtccgggtagggcttcaagtaggcgaacttggtgtcgtggtatgccactacggccgccgcgaccagcttcggttccggatccgctcctatccttctgagcaacaggtcgaaatgtctgggatggttcgaaccgtactcctttaccacctcctgcagctcccgatacagctcctcttccgacagatccgtttctaaacccgcctcgatcatagcgcggatagcgttcctacgcgcttcctccgccagcttggaggacgggtacagtgtgtcgtccacatcgaacagtacggctttgatcatggggggactccccacgcttcgcatcgagccggttccgctggagaggaaggtacgacccggagacgacctcgcggagctcatcgcggagtccgcggagctcgaggagggggacgtcctcgcgatcgctcacacggtagtatctaaggccgagggggccctaattagtctcgacgagatcgagcccagtcccttcgctaagaccctcgccgagcggactggtaaagatccgcgtgtggtcgaggtgatccttcgggaagcggagtccatcgtgcgggtcggtccggacttcatcatcacggaagtgcgaggagggatggtctgcgccaacgcaggcgtcgacgaatcgaacgcaccgcccgggtacgtgatcgtcctgcccgaggatcccgatcgcagcgcccgagaactccgtcggcgtctccgcgaactcgtcggagttgacgtaggagtcatcatcaccgacactcaaggtcgacctttcagggaaggggttgtcggcgtagcgatcggggcctccggagtgcccgtactggccgaccggcgtggggaccgcgatctctacggtcgcgagctgaaaatcacgatcgtagcgctcggtgacctcctagcctccgcggcggagctcgtgatggggcaggccgacgagggtacgcctgcggtcatcttccgtgggctcaagcccgagcttgagcggttcgaaggtccccggaaggctcgagcgattatccgctctccaagtagggatatattcagatgaacaaacatttggcccacacaaacctcacgtgggttatctcaccaaaaagtatttaactaattgtggttttcagtgagttctggatagtacgatgataccccgggtagctcgggccgaagcccgggtccggggttgatgtaagtcggggggtaggtaggaggttcaggataaaaggaaacaccgagctactaactttaacagtaatcttcacactaatgacactgtgtgccaacagtgcacaggctaacattacagtacatatcacggtgtacaacgattcggacgcatgggatcaatcacatatccaagcatatgatgagttcctaacgcggtgtgagcaaaacggtgtcaaggtggcggtgttccactacccacactgtgaaaacaccgcctccgggatcaccgacgtgattaaaggacatctcggtcccaacggggcgatcgagttcgtcggcgtacacggcacttcgcactcgatcgccggactcccggaggacgtccagaagatggaaatccagtactgctgggagttcctggaggatcaagggctcggaccctatctacgcaaggacataatctccccgtcgcccgagtggatcatggacgacacgttcgtcaaggtctgtcaggaactcgggacccgagaggtggtctgcggctacaggacgtgggagctcgaccccgataagcacccgcggtggtacggtaaagactacgactacatcgcggatatcatggtgatcaagaagctgaatactaacgggtacaccgtgtacgtctgtccggtgatcgacttcgaggagctcgtaggtgacgtagtggatgaactgggcgtctacaatctcagtaaccttaagaccatgctgcggaaggccatcgaaacgctgcgcaatactggcgcgattcgcgacggtagccaccttatgatgtgggtactcatccacccgtggcagctaaccgaagatatacgcgtcggcaggaatgacaacacaagaccaggtatggaattgatcgaagagttcatacagtgggtcaagaaaggtcagctggactatgaggtgaatgggattaacatcaagttcgtactcgagaacccgagcgatgcaatacggatcgagaggaacatcgagcagaacccgacggcctacggccatccgatggtgaccgtgacgaaattggactgggtctcgatgatcaaggccagcggaggtaagacggccagggaattgaagcatgatcaccagaagctcgtcgacatctgggagcgggcgatgaagaagctccagaaggtcgcaccccagttgtcgtccctgaggcagacggtggacaggctggtctacgacgtcgtgctcagggcgaccaacgagttcaggctcagcgtgatggcgacgaaaggggacttctggggtaccaagtacgatgccacgcagtacgtgcaaatgtgggagcgggagatccagatactggagggggctgattcaggggacgatccagtacgtgggaaccgagtcggtcccgggagcccaggtgatggtgttcaagcaggacgatcagaccatcaaggtactgttccccgagaacaggtggtacttgtcacagactatcctcacggcggggcctctgagcgctcagaagaccgactacggggccgactacgcggtcctgacgatccggtgtccagtgaccacccaaggatggaagatcaccggcggcgtgatcgtgatcaaggaccagaagggcaacgagctggccagggtgaggttcggtcccaacaacgtagtgaacggggagctggtcaaggaggtgaggctagagggtctcggttcgtacccgccggagttccaggtaaggatcgaggtggtgttcgagagacgcgagacctggcggacaccgagtcagacgatcaccctgacgacgagcggtacctccacggtcaggctagctcgggcgtcggtatcgggcgagctcaaggtgaaggacatctcgggattacaggcgacgttggtggtcagttactcggtgaccactgagaactgcgacgtcgaatcggtcacgatcgaactactgcgtgacggtcagatggtcgacaggaagacggtgagttctccgcaaggttctgttgaattcacggtgaccgaggagggtgagtatcaggtcaggatcatcgtcgaatgtactcgcggtgtaacagctgagacgctaacaaactccgttacagtgcggttcccgagtgcttcggtgtctggtgggcttagtatcgagagtgtgagctcctcatcggcggtgcttaaagttgactactcggtgacaaccgaagactgtagcgtcgaatcagtcactgtagaactactatgcaacggtcacgttatcgacactaagacgctgaactcaccacaggattcagtcgagttcacggtgacccaagagggtgattacacggccaggatcatcgtacagtgcacgagtggtgtaatcactgaagcgatgacgaataccgtcacagtacgattcccaagcgcgtcagtatccggtaagctcagtatcaaaaacttaggcgcctcatctgcggtactggaagtcgactactcgatagcaaccgagaattgcggtgtcaactcagtaacgatcgagttactacgcgacgatcaagtagtcactaccaagactgttaattcaccacaaggttccatcgaattcacggtgaccgaggaaggcaaatacaaggccaagatcattgcgagatgtacgaacggtgtgaccatcgaaacactgaccaacgcagttgtagtacagttcccgagcacgcagacgccggccggcattcggttcgatctatcgatcctatcgccgctggcggcgatcgcgggtataatgttggcgtggcagctcctcggccaaccggttcagaccacgagtgagaccgtggaagcacctacaatcccgaacaagcaagtaacggccaaggaggttcagaaggagggagtcgagcaggaacgtaagacgacgaacgtcccggagaccgagaagatcaaggagggtaaggagctcgggaagccgctgtcagaactccgatctcgagaggaggtggagaaagtgcgcggagcggtggaagtcggagagtcagtacggagtgagaacggttcgagccgtcggcgaggtggtacgaccggtgtcctggtgatcggtaagtacgtcacgggaatcccgggcgtgctagcgctgctagccggagtgtgtgctgtagtcggtgcagcgctgatcttcaggtgtcggcgctgacgcccctcgatcattttatatcttccgaatcgttactcgtctcaaaacgttcgggggagtacggggttgcattacgtcctggagtgtgttgaatgcggttcggagttcgatgatgactcactggtacggtgccccgagtgcggaggactcctggaggtggcactgcgctacgacgaaatcgaggtgagtcggtcgacgttcgagggtcgtcgcctcggcgtatgggccttccgggagctcctaccagtgaacacggacgatcccgtcacgatgtccgagggcggtacgggcttacacccgtgtccgagactgggcgaggagctcggtgttagggagctgttcgtgaagaacgagggcgagaaccccacgggctccttcaaggatcggggaatgaccgtgggagttaccaaggccgtggagctcggtgcggaggtcgtcgcatgtgcctcgacgggcaacacatcggcctcgttggccgcctacgccgcccgcgcgggccttacgtgtgccgtcctccttccggccggtaaggtggccctaggcaaactcgctcaagccctcttccacggtgcccgcgtgattccagtgaacggcaacttcgacgacgccttggatgtcgtgaagaagctggccgatgagggcatcgtgtacattctaaactccgtgaacccgttccgcctctccggtcagcgtaccatcgcgtacgagatctgcttgcagttggactgggaggtccccgacgcggtcgtcgtgccggtcggtaacgcgggtaacatcagcgcgatctggcaggggttcctcgatctctacaggctgggaatcatcgacgagctcccgaggatgtacggagtacaggcggagggtgctcgaccgatcgtcgaggcgattcggcggggcaaggaggacatcgaaccggatcccgagcccgaaaccgtcgccaccgcgatccgcatcggtaacccagtgaacgccatcaaggctctccgtgccatccggtgttcgggcggctgggccgtagaggtctccgacgaggaaatactctcggcgcagcgtgagctcgcaacgcgggaggggatcttcgtggagccggcgagtgccgcctcgatagcgggactcaggaagttcgtggaggagggtgagatcgacgccgacgagcgggtggtctgcgtgaccaccggacacggtttgaaggatccggagacggtcatggaagtgtgtgagctgcctgaacccgtggaaccggatcccgagaccatacagcgtttaatcgccgagtgacctctacggctccctcggatgtcagtcttactcacagggcaaggtcgctccgcgatccttccaacgtcggaaaacgttatgaacacgataacgaatcacgaggacggcggcgggcgcgccgaggggtggacccggcccccggagcccggtactcccccggccgacctgcctccggcgacccccgagcggccgcgggtccggggtgggctgctccctctcgggcctgacccggtgccccggcaaaggcggtggcgcgccgccctccggcggcggccccgccaccccgggcccccggggggccggagggtcatcggtcgggtccggggggccggtactccgggggaccgggccgccccctcggcttcggcccccgcatgaggcggatttcgggttacagcggaccgccagcccgccggcctagcccgccgccatcgagatcgcctcaaggacggtacttatagtttaggtcgtgatcggtcagtatcactcccgcgcgatgtacacgtacgcctcataactacccagggatgttttcacctccacccgttcgcgctcgtagagtaccgggtatccctcgtacctgtctatcgcccggatatcctcgtcactcagcccgacgagcagtgctccctttacttccgatccttcccgttcgcggatcgtgttgtaccggcccccaacgtcctcaagcgctagctcgtacccttccagtaccgccgggtagatgatcgtaggcaacctgttgaggacaccgacgaccatctcggggtcagtgagggttccgtacgcaaagacacgctccgggggaaggtcttttgacggttcctcctcggtcggagtgactaccagtgctccgtcggattccgcgaccttatacgagaacacggcctcttcttcctccttcgggtccctctccggtaggaacatttgacgaccacctcttcccacgtacacgtacacttccacacgggtccccggggggaacccgcccgttggcccgtcttatgcgtttgtccttccgactgccctccctccgagattgcgtcttaggatggatcctcctcctaggaatctccgcgctatactcgccccacttgacggtctacgtgacgttacccgcgcttgcttcattcgtcatcttactactggaccgtctcgctaagcgggacgtgcccccgaatcggtggcctttcgtcggtttagtctacgcggtaccgttagtcctgagtgtcccactagggaccgtcgcagtcgccgtcacgaaaggcgtaatgtcgacgttcttgaccttggctctgctcggaacggttcgctccggggtactccgggcggttcccgtgctcgcgtacctcgtgatagactcgctggccctggctaccttgaccggagttcccctcccaccactccttctggcatcactcacgggaggcgtcgtcggggccgccgtggtggccgttgtcgacacactgaccttggcatcactcggcatccggacaaccgacgccttcggagaattcctgtccttcaaatcgggccgcgatcactccctgcactcccttttcaggggaatggagactcgaacgcgggttcgggttccagtccgggtattcgcgttcatgaccaagaacggcgacgtgaagggttgtttcgtgattccttggatccatcctggcccgctgggtgacgtgggaggaggggacctccccggcaggatcgtgcgacggttgctgaaggaggggatcgtacccctcgttttccactccacgacaacgcacgatttcaacccggtggatcggcgggaagcgggtaagatcgtggaagagaccgtcagattggtgcgcgaggctgcggatcgagagggttgtagtgtaggttccgctccggtccgcggggaagagacggactcggtcggacaaatattgggggatagactcttcctagtgctgtcgaagtacccagagcccagcgacgacatagacgctgccaccgggatagccctcgaacgcgagaccggtggctgggttgcggactgccacaactgcttcggagaccccgatcgtgggagggtttacgcgttctccgaggacttctggcggctcatgcgggacgctcgtagaatctctgagagggtggaaccgacccccggactcagggcgggattcgatcacgccgacccaggcctcgaccctgaaacgggcttgggcagcggtggggtctccgtggcagcggtggaggctgatggaacgcgcacactatacgtcgtgttcgactcgaacagcatcgtccgcgagctcaaagaagaggtagagcggacgctacgggacctcgccgaagaggtcgtggtctgcacgtctgactctcacgaggttaatcccaggggctacaacccgctcgggcagataatgggacgaaacgataagaggaggttactgaaggccgtcagatgcgcggccgagggggcgatcgaggatctcgaagagtgcgaggtggtccccgtggagggatgggtgaaggtagaagtcacgggtccggggagcttccagcgactcgttcactccgtggagacgaccaggacggtgatcggagtactccttccgacggcgttcttgggggtggcccttctttcgctcctattcggaatccgcacgtgatggtacgagggtatactgtacggccttcggccttggattcggtcacgcttcgaggactgtggggctcggtagagagctacgtcggatcggactggagcccgtgttcagctccttcggtgaagggcgcgagatgctcatgcgtgagttcccggacgcacccgtgtacggactccctaagatagaattgttctcagaggacggttcgttcgatctgctcctacttctacgccgtcaccccgacttaccgctgaggttctacgcgggcgtagaggccgatcggcgcgtgattcggcgacacgggtgcaaggtcgtcgtttctgactgtcagttccacgccctcgttgccgctcagatcataggtgtaccggcgatagtaatctcgaatatgctcagagtacccggcgaaggttcccttgtgcggctgatcaacggaatgcttcgacgcatgttcgaactcgccgacatcgtcctcatacccgacacctacgacgacacctacgacgttccggagatagacacggaggtcgtatgggtaggacctatcctgaagcgtcgacccgacgagttgccgcccagagacgcggtacgtcggaagtacgggattccggacgatgcgacagtggttctagtcacggccggggggtccaaatacggccgtcggatagttcggatcgcggtggaaggacttaagctactctccaagtcgatcgacgtgttcccggtgatcatctcggaagagcgtgtcggcgacgggctcgggctgcagttacggtacgtggacaacctcctggaacttatcaaagtctcgaacgtggtcattactcacgggggccacacgaccctctccgagtgtgcctgcttacggacgcccgtagtttcggtacctctgcccaatcatcccgaacagcacatgaacgccgagcgagttctccaacggggattaggggtcgccgtgcctcccgaagaactctcaccgaagcggattgcggaggccatagaacaagccatcgactggaaggtcccgaaaatcaggatgatggatggaaggggggccgagcgcgctgcgcgcatcgtcgcaggaacgcttgactagcaaggagttgggtcgccagcttatccacgctacgttcggtctcctgttcctcctccctcttcacatgctcggagtgtacgagttcgccttactactactctcaggtctcatcgctggtgtatccgtatctttcgcgttaaggcgcggccttcacgttcccatagcgaaagaactcgtagacgccttcgaacggcccgacgagatgcacatacccggtcaaggaacgctccactttgtgacgggtctcctcctggcgaccatcatctgcccctacacgaaggtcctcgacgttacgatcatcgtcttatccgtcggagacagtgcctccacgatcgcgggtaaagccatcgggcgtatccctataccctacagctccaggaagaccgtggagggcagcctcgtgggcttcaccgccgccgccctagcctcactggcttggactggggatgtggtggtttcggctctagcggcgggggtcggaatgctcgtcgaaagcttgcccacgccaaacgacaacgtgacgataccggtggccgtctctgtggcgctaggcttctggtggggactactgtagattgcgctggaacctgacggtaggggtcaccgccctggcccttattctcctcgtcaccgcgctggcaccgtcctacattccggccgcgtgcctactgctggaaggtggaagccgccctaaactcgtagctttcctagggcttctcacggcgttttcactggggtctgcagtcgtaagaaagcgtcccgatcctctcatcacgagcctcctcctcttagtgcttcccttcacctcgaacctgctccattgcgtcgccgctaagtcgatcggtgtgccgccaggctcggagtttttcgtgttcaacggccgagtactcgaaggtgactcgcctctccatacccacataggcaaagcggcacttacctgggcgctcgaacgtgtctgcaggatctccctgtacatccactgtggcatgtcactggtggagacgtaccctacctacgtcctcgccgctgaattcgtggtagtatctctctcggtcctgttaggtgtgttcaacaccagggaccctttgtcttgcctagcttcctctctgttagtcttgagttctatcgacggtggagcgttttctcttccgtacgtccatggtagctggctgttggcgttgagatacgtacgtgaacccgaattgatgatcatacttctatggttcgcagcactgtccccgtactgcaaactggtcttgggaacgctcctaacccacgcatattacggggagcggtgggattcggttcgcctccaggtactcgcgggcccgctcgacgggccgttgaagtcgctcggaggggtccgatgcgacgggtactacgtactcccggtgaggagttgcgcggagtggaaggagttcctccgaaacctcgaggattcacttcgacggtcgaaggtccgatgggtcgccttctgtacgtttcctaacatggctatgtacctttgactagtctatcccgtagtatctcttccagaatcgactgggtgttcaaccgtagagctttccgtagggccgacgaagcctcctgaacgtaactttcgaggagtttctcgtacctctcctctaggtccttcaccttgctctcgagctcttcggtttcagagcttaacttcgagcgtgcctctttcaactcactgcgtagctgttcgatctcgtcacgcagttctcggagctctttcctgacgcccttctcgcggtcgagcgtcttcagtacgagttcaacgtcgaaatccgcctgaactagtctggtgagcacgcggtcgtactcagcctctgaaagctcttcccttaaccgctcggtcagatcctcgaggaacctctcaaggcgccgtgcgatcttcggatctaggtcccgaaggacctcgcccaaaggcgctgtgtacgccttcaactcccgtccccttcgagttcgtcaatgcggaccggcaacgtagcgtcggggggaatcttgcggatgtacctccgcctgacctccggatcctgcatcctgcagtggggtctccacttgccccactccggatgtgaagtcattcgcttccacgccgcttttagtccatcctcgcggatatttccgaaggagatcggggtgaagtcgcacggtgtgacctcgccgtcgttagtcacgtggcactgcacgtacccggcgaagcacccggctccgtgctcgctgttcacgtaagacatcgcggagacccgtggtccactactcttctcgcggttccacctgagatggaggtcaatgagatcttctcggtgctcgtccgatagtatcacactctcctcgtgaagcagccggccggtcggtacggcgtcgaagatcgtaacctcgtgcgctcccaggtcggcggcgagacggaccacgtcctccaccttgccagtctccacggtttccggtgtagcataagtcgaaactccgactagcagtcccgcatcgagggcggctttgatgccgcttatgcaccgctcgaagagtccggggacgcctctcagttcgtcgtgctcctcggggtccggactgtcgatactgacgtgtattgcgtacaatccggcttctttcagctccttcactcggtctttcagggtgtaccccgatgtgaacgccgtggcaatagctcggtcgtcgtccacggcttgaatgagttcgggtaaatcctctctgaagagcgggtctcccccggtgaaagtcacgttgtatgtgccgaggtcgagcgcttcccgaatcgcccgatgccagtcctccgtcgagagttccgtcggtctccgtctgtcggcgctgcagtgcacgcagttgcatggacacctctgggttacggccatggtgacggcttctggaacgcggcggcccaggacctcggacttcaacctcgcccggaggagacgcgtgaacgcccggctggggaacggtggtaagtacagtgagaacacgatcctgtcctcgcggacggccgccggcttctcctcctctaggtgttcgaacaacctcttgagtggtctcaggagtgaagcgagcttaccttccatctcgaagctaacacggccctgtttcaccctggctttgacccgaatccccggcttctcgagcaccgtaatagcggtcaaaggctgttacgtccccaacacgtgataaggtgctcttaagttgagtacgaggaggatcagtgcgactatggagaccgtggttgaaagacgggaggctaaagatgggtccaacacctcccgaagcacctcatggactatccgtccaccgtctaatggtttgatggggagcaagttagcgacaccgatgcccagtgataacatccccaacatgttcaggaacatcacgagcgccaccatcacctcggagacgaggtaccccccgaagttcggtatgacgtaaacgccaagcaccggccgacctcggtgctcgtgtaccttcaccaacttggtccccgaatccgtggccacctggactacgtcgccgggcttgtggttcgccagtgcccgtcggagatcgacgatggttttaaccggttgtccgtcgacctccctgatcacctctcccgtatgcagtggtacgtctttgaacattttaccgtggaccattacacccgacgtcacgtatcccggtatcgcgcttaagccgagtacggcccccatagcgatgaacgacgtaagcacgttgaacgccggtccggcactgagaacctctattcgccgcctcagtggggcgcgtcggaactcttcctcttcgagttctacgaaggcgcccgggaggacgaccaccaggaagaaccctattctcttgattcggatccctgagagtcgtgcggctaccgcgtggccgagctcgtggaccgtcaggatgaccgccaacgatgccaggcccgagatgagcggtaaggtgatccccgggaggagtacggtgaacccaccagaaccttccgaggcccccttcacgagcgtatatattgcgaacgctaagcccgcgaaacccaggatcggggacgcacgtaccgaaactttcaggacagggcccaagagcgtatgctcaagccaacggtccatgaagccgacgctccgagtcgcacggtagaggataccgtagcggaacttcatccccgcggcccgtcccagggccatcgcggccaggatgatcgtgagtgcgatcgcgaccgtttcagcttccaatggaatcccccggtgtgagtggacttgagggaggtaaggtacacggaggagcattgggagctgctacgcacgctcagggatcgagccagaaaggtcgtggaaactctatcacagtttgggttagagggttgggtgcacggaagtgtcgcccgaggcgacgtgagaccgggtagcgacgtggacgtgttcataccgactcccgtctcacctcacgtagtcgacgcgttcatggacgcggcaccgttcgaggtagttggcgttaccgcggtactacccacacctcgggactgcgtccgtatcaaggtcgcgatggaggaagacgttgaagtgacgttccccattacgccgccgacggaccgtgaactcgagtttttcgacttttcgggaaagctcacccccgactcgctggagcgggacgaacgggttccaggcgtggacaagcgactgaggatgatcgagcccaaaccctggggccatgtggagtactcgatcctaggccgcgagggagaggtggctacgaagctcggggtgagcacacagctgattcacgagagggttcgcgccttgacgcgcagggataaagtaggggtacagggtgtgcacgcgaaggtcgaaggtcggccgggagagccggtcatcgaactccttcgggagctcggaaggcgtaacccgaaggcggccgagaagctgtccgagctcggggtgtaagccttgacgaagcccgtcgagccggacgatcccaggatacgactgcttctggcgtacgtgaaccgagtgaaggaccgagccgcttccggcggttacagcggtgtcaatcgacgacagctcacggaggttctgcagtccatagagtcgacgctccaggagctcaggtactcgtatttgccgccggaaaacgtctcggaaagactgaaggacttactgccagacctggaggacgtcgtcgatccggaggaacccgagctcaggtggctcgttgagtacttggaacacgccgacgaagtcttcgagcgcgagataggggacgaggccgacgccgtactgtgcgtggtcggcgaagtcggaagcgtccgagagcatccgaacgcggacaacctctacatcacggtggtaaacacgggccggttcggcaagcgtaccgtcgttacgaacctcaccgacgtggaggagggcgactcgatggccgtcgctctactcccgcctagggagttctccggagtcgtcagtgaggggatgttctgcggggaagccgacggagagccgggggaaatcatagaaccacccgagcgcggtgaggtacggagtatcgtactggaatggatagaaggggtgtaaggactatggttagcgctgacgatctcacgtaccgcgagaagctggtactactggcgctatacgaggagttcgacggcggtcccgccggagtgaagaagctggcgccggtcgtacacatggacaagacgaaggtctcgagggccctgaacgcgctcgaagagaagggactcgtggagttcgagcacatggagggacgtcgcctcaccgacgagggcgagaagatcgccgaggagatcgcggaggagatggaactaccggaggacgaaggtccttaccagtgctccgactgcggcaggaaatacaagcacctacgactcaagtgcgcagtatgtggcggcgagatcgaagtgaacaaggaccatccggacgcggctaaagccgagtggaacctggagcgtgcgaggatgggctacctgtagagcccttgcgatgaaacgtcaaaacccgcctgttcttttcccatgacacgtgtacttctccggagtcagtgaattgaacgacaacaatttcccgtttcttcacgtcaccccgagcgttcaccgtagtgacttcggcgcggatgtaagtcacgttacccgcctcgtcctcgaacaacggtcggattcccacgataagttcccctcctccctcgccaagacggagttggcgtagtacactaggggtcgatactgctcccacttcttgtcgtaaaccgtgatctcttcaggccccacgcctatcacctggagaatcctcgtcagcacgagaccggcccccgaggttaccggcggaaaaggcgtcgccacaccgctccgttatttatcgacctcgagcgggcaagcccaccggggagctgctgcttgaccaaggaacactggtcggaggtgaaggcgcgggaagttaccgagcactgtcggaagcacgctgacgaactccccgacgagatagtcgtggccagcggggcttcgacgtccgggcgcctccatgtgggaaacgcccgagacgttctcactgcagacgccgtggcccgagtcctgcgagagcgctaccatgaagatgttagggtcgtgtggatctccgacgatgtggatcccttacgtcgcatcccacgtgacctcgacggtagactctcggaggattacctcggtgtaccgtacaaggcgatcccagtaggcgacgagccctattctgaccgctgggctcgtaacttcgtggaggagctccgggagttcggtgcggaggttgagtggatctcgtcggccgaactgtacacggacaacggcttcgtaaagctggtccgagaggtcgtgaacgattactacggcggcggtgggaggctcgcgagcgtcctcgaacgtttcggactggaggatgcgcgggtctacatgccggtctgcgaggagtgcggccgcatcgctactactcgggtggtcgacgtagacggttggcgtatcgagtacgtctgcgaaggacggcatgagataggggacgccgtcctggaaggatgtgggcaccgtggagagctcgacctcaggaaaccgatagaggtcaatgggttcgagataccaccgggcaagctcgggtggaagatcgagtggccgacccgctgggtctacctgggtgtcgcctgtgaacccttcggcaaggatcactacgtggccggaggctcgtacgaggtggggtcggctatcgccgaggagttcttcgggttcccggccccggtaccggtcccctacgagtggatcacgctcgacggcaaggcgatgtcctcctccaagggacactacgtgaccctgtccgattggggggaagtatgccaccgcgaggtgctccgctacctcgtcctgcgcggcaaaccgctgaaacatctcgacctggacctacggttcggtcttctgcaggcggtggacgactacgatgagttagagaagcggtacttcgccggtgaagccgacgagagggagcggcgcatctacgagctttcccgagtcgatgagatcccggaggagtgtccaccccacgtaccgttccggttctgcgccgtcgtagctcaagtagtgggtatcgaagacgacgtctcggaggaagagttcgagcgggcgctggagatattccggaggaccggacaccttgaagcggagcccgagggcttcggtcgggagtggctccgggagagactcgagaaggcatcgcgatgggtggacaggtacgccccggaagaggcccggttcagggttcgagaggaaccggaacccgtggagttgtcagacaaggagcgggagttcctcgaggacctggtccgccggttagaatcggaaacaactaaagaagatccggaaacactacagcggacggtgttcgaagccgcccgtaccgccgggctacgtcccgcggacgccttcagggtgttttacaacgtcgtggtcgggaaggaccgaggtccacgtgctggcaccctcatcgcggctgtgggggtggatcggatttcgaggctgatccggggctgcctcgaggcttccgaagactagacaccggaaatgtggtccgtggtgccttcccgaagggttgtaggctctgcgtgtgcggcgccaagctggtggtgttcgtgaccggggtctgtaaccgcgggtgttggtactgtcccgtatcgccgaggaaaaaagggagtgacgtttccttcgccaacgagcgtccgatacggtccgagcgggacctggtgaaagaagcggaattaatggacgcggaaggagcgagtctcaccggtggcgatccgttaacgcgtctcgagagggccgtcaacatcatccgcacgctcaaagacgagttcggcgacgacttccacatccacctctatgcgccggcggagtccgtcagggaaggggcgattgaagagctagatggagtgggactggacgagttgcgcgtgcacccctccccggactcgactgtcaacaggcgtgcggccgaggtcctggaggattccggaatggatctggggttcgagatgcccgccattcccggggaagaaaactggatcctggaggtagctaaactggcggacgagtacgggttcgacttcctcaacgttaacgagctggaattcaccgaatctaacgccgaagaactcagaagacgtaggttcgagcgcgtagatgacgacctgtccgacgccgtcgccgggagcgagaggacggccctcaccgcgctatcggaggttgctaacgacgtcggcatcaccctccattactgtccttccgaggtgaaggatgccgtccagttccggaaaaggatcaagagaatggcgaagaacgtggcacgtgaccacgaggagatagatgaggaagggctcatagtgaaggggattttcgaagtaatatccggtgatccggaggatctcgccgacgtgctgatcaacatcctcgaggtgcctgaggaatgggtgtatgtggatgggagccgagtagagacgaagccgttcgtcgtcgacgagctcgccgatgtactttcggacctggaggaggcctctcgatgcgagattcgggcctggatcatccgggagtacccgacatgggatagaaccgtggtagaacgatggccggtgcgggggtgagtgcgtcgcgtgaagacatcgcactccggctacggcgtgtgagcagagtctggggagcggcactgtacgtaggctccgtactcctcatcgtcctgatcgccgtgttaggactcggagccctaggccaatacagctaccaggctcaagtgctgctcttcggtaactacagggggcagctggcggagatcgatgagaagtatcaagtgctcaagacggagttcgatcaagccaatcataagctacaggcactgcgtgacctgtacccgatttcgagtgccgacctccaccaagtcgagaaaatccgcgctaaagcttccctagagctccagtcgttgaaactgaagaagaaagacaccgaattcgcggtctacgtgctgaaagatccggcaacctccgatctgaagctgaaggaatgtatggcggagctgcgacgcgcggaagcagcggtgaaggcgttcgtacgggcggtcaaggggcttgaagacaagtacgccggcagggtccactgaagtcgacctgggctccctacatcccggtctgaaagtcgagcgacactccggctacttacggttcagactttacggactgatcgagttcgaggtggaccccgaagaattccgccgaatggtgactgccgtaatctccaaacgtgagcggcgcacggtaccggtcaccctgcaaggcactcgtgtggcggctccggtaccccgtgaggtgctggtcggcgttctaacagatctcatatccagactcgccggcgagtccggaaagaacgcctacacgggtcgtagggtgtactacatcaccgagactacaggtatcccgctgataggccacacggctttcggcctcatcgaccgtggaaccaacgtaatacaggtgcgcccgctctccgggtgcaatctctgctgcatatactgcagtgtggacgaaggaccgatctcccgcacgcgttcgcgggatttcatggtggaccctgactacctgatggagtggttcgaccgcgtagccgagttcaaaggtcagggactcgaagcgcacctcgacggtcagggtgaacccacgctgtaccctttcctgcccgatgtggttcaagccctcaaggagcacccacacgtcgacatcgtctccatacagaccaacgccgtaccgctgagcgaagacttggtggacgagctcgtcgaggctggaatcgacaggttcaacgtgagcgtcaactcgctcgacccgaagaaagctcgggccatggcgggccggaaggactacgacgtcgagcatgtgaagagggtggtcgagtacatagcccaagagaccgaggccgacgtgctggtggcgccgctgtggttgccgggttacaacgacgatgatatcgtggagatcatcgggtgggcggcgaagataggggcggggaagcggtggccgccactcgggatccagaactacctagagtacaggttcggtcgacgacctaagttcctacgtcgggttataccgatgaaagagttctacaggtggctcagggagctggaaagcaggacggaagtgcgtccgctggtgctcaaacccgaacacttcgggaccgagcccaggaaatcactaccgaaaccgttccgacggggagatgtgatcagagcggaaatagtgttggaaggacggttgcggggtgagatgatagcccgagccgccgatcgcgtgatcgccatcccggactccgccaagatattaaacgtgggagaccgcgtccgggtgaaagtgacgagggacaagcacaacatcttcgtggggatcttggtctgaaccagggggagagtcaccaatggcggaggaacgctcgaaggatgacataccggactggtgggagaaggagtgggttgagttcaggtaccggggctacaccctgggcgagctgatgaagatgcctatcgaggagttcatcgagctactccccgcacgccagcgtcgctcgctgaaacgtggcctgccctccaggcacaagaagctgctgcgcaaggtccggcgagctcggaggctcctgagacgcggtaagaagcctccggtaatccggacccactgccgggatatgatcatcctgcccgaaatggtaggactgaccatcgcggtgtacaacggaaaggagttcaaagaggtgaagatcgagccggagatgatcggtcactacctcggtgagttcgccaagaccaggaaaaccgtcgagcacggaggaatcggtgctacacggagctcgttgttcgtgccactgaagtaatcaccacctagcatcgggcacctcgacgtgtacgccgtacagggacagtttcctgtccacctccaacacccttctcactgcggatagagctattgaacccgatttcagcgcgacccagtactcgaaaaggccgtcgtactccgtgcccaccttgctgtcctccatcaccagtattccaggctcgtcagagcccagagaggtgaccttttggaccatctcccggaacttgttcgtgaccttccacactttccattcgcgctctacatcgtactccctgaggtagcgtagggcgattttcaaagcacctatcagcgaccgtccccgcctctccacaggttcatctaccgaggctgacccgtgaaccttgagctcgtccagcggcccccgtgagcgtgcctcgtgcctttcgaggatcacctctacgatccgggggcgagacgtggagtccgcctggcgtacggtgacttcgaacgtatacctggtatcggatgtcacgtactgcgcgatgctattggtaggaagctcctcctcggcacgcacccacaccatcagcgagcatctagcctccgaatactccttcagaggaacgcgctcggccatttcttttaaggtcttgtaaatctccttcacgcgtccacttttgagctcgggggcacactccctggctaactccatcccggtcctgcgaggcgaggtccgtaccccccggacggaggtgattccaacatgatcgatgtcctcctgatcaacccccctgatgtcacgactaagtaccagcgattcttgggcattacagcgcctccgcttggactagcctacatcgccgcggtgctcgaggaggcgggatacacggttaaaatcctcgattgtcccccactggacatgtccttcgaggacctgagacgagccgtgcggaagctccgtcctagaatcgtatccatcatggccacgactccgatcattcaccaagcctaccaggcggccaaggtcgtcaaggaagaactagaggacgtcatcgtatgccttggcggttatcatcctaccttcatggacgtcgagtgcctcaaggagtgcccctacgtcgacgtcgtggtacggcgtgagggcgaattcacgctcctggatctggcgaaggtgttcatcgacggcgtaaagacactctcagaggtactggggatcacgtaccgggagaaggacgacatcgtcagagcccctgatcgacccctcattcgcgatctcgacgcactaccgttccccgcgcgtcacctgcttcccatggacaagtacactttcttcggggctaaaaccaccgccaccacgatggtgtcgagcaggggttgtcccgtaggatgtgacttctgcgcttcttcagcgatgcacggccacaaactccggatgcactcggccgagcgtgtggtttccgagatggcgcatgtccacgagaactacggatcggacatcatagccttcgtcgatgacacgttcacgtacgatcggcggcgtgtcgaggagatctgtcggctcatcgtggaaagcggtctagacgtaacctggggctgtgccgcacgcgtcgacacgatcgacagggagttacttgaactcatgcgcgaggcgggatgctcggtcctgttcttcggagtcgagtcgggtagccaggaggtcctggacaacgtcggtaaggggtttacggtcgagcagacgaagaaggcgttccaactctgccgcgagttcgacatagtgaccgtggcttcggctgtgatcggcttaccgggcgagacccacaggagtgcccggcagacgataaagttcctgaaagaaatcgaccccgattacgccgtggtgtccgtcgcgacgccatatcccggcactaagttctaccaagaggccgtggagaaagggctcatcgaggaaaagtcgtgggacaagtacaccctcatggacccggtggtcaggacgaccgagctgtccccagaggaggtgaagaagtaccaaaagcgcgccatgatcgagttctatcttcgtccccggtatcttatccgacggctgaaggaggacggcatcgatgccgtccgtgtgaccggaacgatgatcgccgaggtcgcgttcaagaagatgaaagcgttgttggctaagatcccgagtcctcggttttcacaccgcaagggctcggacgagtgacgaacgcctcgtaacctaaggcgcttagcgtttcgacggcacgtttcgcatcctcctccctctcgaataacgcgaccgcgcatcctcctcctccggcgccggtaaccttcgcccctaaggcgcccgcgctcctgaatacgtgtacgatctcctccagggcacgcgtggagacgttcagggccgccaacagcccgtggttggcgttcatgagctcccctacggtccttaagtccccatcacgcagagccgcctcgaggtcatcgacgagctcccctatcagctccatgaccccgtcgacgatgtccaacctctcgcggagttcggccacccggcgcaccatctcacccgtacgactgggttcctgggagtgcgccacgaccagcacggggttacgctccggttcaatcagctcgaactcccgccctgaaaccctcacgaacccgccgtacgtgaccaccgtggcgtcggtccaactcgccttcccctgcacctcgagctccacctcacggacaagtctccgtatctcttccctggagacgtttacacccgatacctcggctagtccgagtagcactgccgccgtgaccgcagccgatgtgcctagaccactcgccgggggagcttccgacagaatcctcaggttagagggaggagcgtcgaactcctccgatgcctttcgcaccgccgtagccacgtacgtcagttcctcgtgcaagctctcggatcggaagccctttacatttccgtcacgtgtgatctcagcccttacgttcccctcgcagctcagctcggtttccaccctgaagctgtcgtctccgggttccgccgtgaccctaacataggtatctaatgccactgcgaccgccggatacccgtaaacgacggcgtgctcgcccgccaggatagccttcagtggagccttgacggaaatacgcaaccatagtcccccgggtgaccgagcttgatgttgccgaagacccttaagcccgtggtggaggataagtacgttgagagtctcgaagagctggcggacctgatcgccagcgcggatctaaggaccggagttgtgaggatcaccgcacggtccggtgacgccctgctcgacgcgttcatcgtagtcctcaacggtaaggtcgtctacatcgaggtcgaagaggtacggaccggggaacgatggcggggagaggaagcgttagagcacctgagggagatcttaagtgcaattgagggaggtcagtccgccgttgtcgacgtgttcgaggcctcggaagacgacatcgagatgatcttcgagtaccacggtatacggccgaaggagatcgaactggaggacgtgctgccagtccccgcgctcgaagccgatatcgagttcgagaccgaggaactcgagggcgccgagaaagaggaagctacggaggaaaccgggatcggagtagaagagatcgaggaagcctatgacgaggagccggaggcggtagagtcctacgacttcacggaagaggtagaaagagaaccggaatccctgtcgcgtgaggagatactgaagaaatatgggatcaaggagccggacgagtccttcgtcgagaatatcctgaaggagttcaccggagtggagacggaccttcgagagcggatctcgagggttcttcgcagctacggtataacggtcttcaaggtggaaggtatcgtcgaagtcctgctggggaacgacaccgacgaggaggaagtcgttgagaccattcgggacttcatgaaggatgccggcgtcgacgagctggaggtccgcacgtaccgacccgagtggttggggagaaagatttaaggtaacccagtcgggttaggacccgggctcgggccggcagctcagtctggacagagcgcgggccttcggagccccgtggtcccgggttcaaatcccggccggcccacacgcgttatcgttatggtatccgtaacaatggggttctcgaattggacgatgaactccggaagctcgcagaagcgggccccttcgaggtcacgatcgcgaagctggaggaaatactgacgcgcctcgaccgtcttgaagcgaagatcgacgaggctctcgcgcgtatcgaaaggctggaacgggagctgagggaggatgagcgtggatgagcttccattcgacagcgttgccgtcatcgggctgggagtggagggacgtacctgcgcggcgaggttggcggaactgggactcaaggtctacgcctccgacatcagggaagacgtcgacgtctcatcgctcgagaggcttcccaacgtcgaggtagagctcggtcatcacgacatcgacagaatccgcgagtgcgacaccgtgtatttctcgcccagcataccgaacgacgcggagatagtccgcgaagtccgcaacatcggggttccaccacttgaggatctcctcacatggccagattcttcgaaattcgtcgtggtcagcggaaccaacggtaaaaccacgacggttcatatgatcgatcacctactcgacaaactcggtatcgatcgaaagatcggtgggaacgccggagggggtttcgacgggtacgctaccctctacgtgcgagccgagttggcgcgtccggaggtcgtagtctgtgaggtgtgtgacatgacgctggactatttctccgaccgagctccacggtacgatgtcgcggtcttcctgaacctgggtttggatcacctggactaccacggttcgatcgagaggtatgcggcccgagcagcccgtttctgcgatcgggcccgagagacggcgatcgtcaagtgtgacggggaggaacggaaggtagtcgaaaggatggagagtactcccaggtgttatgatgagttggacgtggaagtcgatataccgctccgaggggagttctacaggctggatgccaaggccgcgctgctggccgtcgccgagataaccagcgaacctcccgaggagctggccccgttactctcggacttcaccagtgttcccggacgcattaaggagtacaagctaggtgaaggccggctggtcatcggaaagaccgacaacctctccgccctgaaggtcgtcttaagggactacggacccctggacgtcgtcttctgggggactccgaggccgggcgaagattaccgaatcgagggaatcggccggaccctccgggaggcgggggtagaacgcgtctacgtgtttcccggcctgtcggaggagaccgtggacgacgtgatcgaggagctcacgagctccggaattgaggcgtctccggtagagccttccgaggtcgcctcgaaggctctggagctggcgcggcgtggtcgggatgtgggagtgctaggaaacgggcaggatgttataatctcaatacaacatgacgtcgagcgtgcggtacgctttttgaccgctggatcggagcgatctcggggatgagccgggatggaggttgaattcatacgcttggcggacgagatcccggagtgtgagttcttgattgagggatacccaggtatagggatggtgggcgtaatcgccatccgccacgtggtgacggagtgcggggccgaaccggccttcgtgatgaagatcgaggacatgccgacggcggcgatcgtgcacgagggtcgtgtgtacccgtcagccggagttttcgtgctagacgacctatcattcttctacgcggagcaggccgatatgcgtcccggagtcgttcagaatatctcggagtccgtagccgagttgtcccgggagataggcgtggagtgcatcgtgtgtctagcgggtatcagagcgcctgacctcgaggatgagccctcgctgtactacgccgccacctcggataaagccgccgagcttttcgagggtatcgcggagccactcaaggggggcacgatcacgggggtcagcggtccgttgctcctagagggtagcttgcgcggtttggatgcagtctgcttactcgtcgagactcccggtacgtatcctgaccctaaagcggcatcgcgggtcgtagaggccctcaacgaggcgttgggtctcagtgtggacgtgtcgaagctcgaggaggaggcggagcgcatcgccaaggctgttgaggagaccgtacagcgtctccgggaacagcaacggatggaggaagaagaggcagaaccgacggagaggatgttcgtgtagcaggctgatacctcctcgcaccttgaaggcgggggtcctacctaaggggttgtgaatcggcttgaaaatgctcgcaatcaccggggtgagcttccgagtcgtcgagcaactcctcacacaagggtctactcagataatagtacgtagcggtaacaacctcgacgcagtcgtccgcctccagcctggtgatctggtcttcgtgaccaccgtcggcaagcgagagctcaagaagggcgtcagtggtgttgtagccacagtgcgctccgtcagcgtggtccacgagcacgtcgtaaccgggggcgacgagcacttcgagcgggaattcgtggcggccagactcatcctgaatcgggtcgggtccggtcgtgttagggagtacaaagactgcggtgtgggtcgtcgcgtggaagtcgacgtagaaatggagtcggcggtttcggaggcctactgaaggggtggagtgggatcagaaggatcgccgccgggatcctagtactcctgcccctggccctcgtctccgcgtacgcggtctaccacgactacgtcgaggccgagaggtacgtgaacgctgtccgcgcccgtatgggttggtctccactaccaccccaactccttccctactgcgatcggttcgacttggtcgcgtaccagcagggaggtctcgtagccttcaagctcttcgtctaccctcccttaaccgcggtaccaccggtcctcccccagataaagccgggtgaggacgagctcagtgtcgtccgcaccctggcgttgttcgtgtccgacaccatgcaatacgatgtcggggcggaacctccggagtacgtacctcccgtgctccgacgcgccttcgcggagctggagctgaggggcagatggcgtggggcctgtggaaccgcctcgtacatgttctcctacctatgccgtctctatgggatcccgacccgcctcgtactgatagaacccacggatacggggaccgtggtttcgggaacgggacgggagcgtgagaggttcgtactccacgcgcaggttcaggtctgggttcacggtcgctggatgaccgtggacccttcggttgggttagtggggacctcggaccggcctgtgcaggggcaccgagtacgtcccgacggcactgagctctacacacctggggtcaagagctacacggtctgtacccaaggacctttggtcttctgggatacgctcaccgggctggtggagttgatagtctagtgcttctgcagtacttcctcgtagatcctccgaaccttctcgatcgtgtccgcgtcttccggacccagatcgtcgcgcacgcgcaccagtctcgggaaccgaagggcgaatccggacgagtacttcgggctcttctggatatcctcgaactccacctcgaaaaccacctcaggcttgaacctaacctcacgtcccgactcctccactatcaagtcctcgaacatcttggtcaatcgctcgagtgtctcgtcgtccatgcccgttccgaccttacccacctcaagcaggttctccttgttctcgtcccagacggccagcaggtaggaaccgatgagtcccttccgcttgcccttaccccaaataccgccgatgaccacacaatccagcgtctcgagtaccggcttgaccttcagcatcttcttgccgcggacgcccggagtgtagttcgcgtccaggtccttcaccatgaccccttcgtggcccatctctagggctcgatggaacatctcggcagcctccttgggatcgtccgtgatcacctgctcgacgagcatcacctctccctcgcgctcgcgcactatctcctcgagtcgacgtcgacgctctcggaacggggtgtcgaccaacgactcgccgtccacgtacaagcagtcgaagaggtgcagctccaccgggatctccttgcgcacctcctcgatatcgtacttccgcttgatcctatggagcagctcctggaacggtctcggtttgcccgtctcggggttgatggccacggcctcgccctccaggatgaactcgtccgcgtccacgcagtccttcacggcctccacgatatcggggagcgcgtgggtcacgtcctcgatcctcctggtgtacacgcgcacttcctctccgtccgagtgtacctgcacgcgggcgccgtccagcttgatctccaccgcgcccttccctccgacctcggcgagcgcctccttcacgttcctcgctgcttgcgccagcatcggcttgatcggtcgcatgggtctcaggtcgatctcgcggagaccttcctcgcccttcgtcatcgccactttggccaccagtcctaggtcgttcgacagcatgtgggccctctcgaccaacttcctgctcacaccgaaggcctgggcgatggcctcctccacggtgctctcccgtacgcccgtccgcagctcactcagcgcctgccgaaccaggtagcgggcctccttcggcttcgccctggcgagcaaccccatcatcagcctcatcttccgcttgacggctccctcaccctcgacttccgctatcttctcgaaggtttccctgacttcgcccaccatgaggggtcgcgaatcgagcagcgtcgacgtcttccgacgcttcagcagctcctcggcggtgagtccgagatcgccgagccgcttgaacagctccgtgacctcggagtcggtagaccccgtggcagtcgcgatcaccttccgcatcagcttggacccgatgccgaggtccctcggatcccatccggggaacacctgattggccaggaacagtgcgacggtgtcgacgacgtcctccggacactgccgtaggaactgggcgatcaggcttatcttggccttcctggaactgatccgctccagcctctcgaaggcctccgccagggacgagtagtacacgtcgtcgtccgtcgttttgaccttgaactcggctccactgggaccgaccgctttggtgggctccctctcccgctcctccttacgagctctcttacgctcctccgcctcttcctcctccctcttctccttcttcctacctttcttcctgggaggagaggatatgaagaagtcgagtttcctggatttggggacgggtcgagtcacgttcaccacccctactgacgggtgttcgcccctttaggaattacccgttttcgctgcggaggtagccagacatggtgatggtggagagggtggtacaggcccttccggagatggaacccgaggatttcaaggtcctacgagccctcgagctggagatgcgcaggcacgattgggtcccgttcgatcgactgctcgaacgcaccggtctcgacgagaaggagctaggctaccgtctgtccagactcgatcgttgggatatggtcgtccgaacgcgacggcaaacggtcgggtatctaggttaccaactgcgtcccgaagggtacgacgccctcgccctccgggcgctcgtggaccaaggcgtgttggaaggactcggcccggagatcggggtgggaaaagaagctgacgtgtacttgggcatctcccccaagggcgcgcagctggccgtcaagttcaatcgaatcggtcgtaccagttacactaagatcaaacggtaccgtgagtacgtgaaggataagcgtcacatctcgtggctttacgttaatagactcacggccgagcgtgagttcgaggcgcttttacacctgtaccctgagggcgtttccgtccccaggcccgtcgctcagaacagacacgtactcgtgatggaacgcttcgagggacgggaactcgcggaaactcgggtggaaaaccccgaggcggtcttgaaccgggtgctcgaggagtacgaacacgccctcgaggtcggcgtggttcacggggacctgagtcagttcaacatagtcgtcgagggcgacgacgtgctgctcatcgactgggcgcactgggtcgaggtatcccacccctcggcccgtgagctcgtcgaacgcgacgtacggaacgtatgcgactacttccgccggaaatacggcgttcacaggcatccgcgggagttcttcgagaattccggatgaggaggcttacggggatcgaggcgcgccgatgagagggtggcccgttaccgacgggccattacacgtcgcgatgggggataacgttccccgatgaattcgacagggtacaacacccgggccactctcgcaaccgtaaaaagagctagcctgggaagctccgccgggggctcgcgctcatgccgatcgagatcgatatggactcgtgtttgctgtgcgaagcgtgcgtcgcagcgtgtcccacgggtgctatccgccgcgaagatggggacatgaaccactgtatcgtctgcggcgcctgcgtgaaggcctgtcccgtcgacgccctggagctcgaggacctcgagcgtgaagtggacggagagaaagtggaactcaaaaggatagcttggaagcccgaggagtgccacaaggaggatccacctcagtgcggtgaggtgtgcccgcaggagatcatgcggattgaagacggctatccggagctccgcggattctgcgtcatgtgcctcaagtgcatggaaacgtgtcctatcgacgcaatcggcatgaagggtgtcgtcgagcccaagtccgagcccccagagcatcccgaggatgaggatgtctatgtacaccccgaacggtgtgtcgggtgcacatactgcctccaggtatgtccgaccgacgccatcgaaatggtgccgacagatgccgagttcttcaaggccgaggagaacgagtggtcgcccgtttacgtggacccggacacgatggagctgaagcagggccggaaggtcgccaagatcgacccggagaagtgcactggatgtacactgtgcgcccaggtgtgtccgtggggagccattacggcagcgcgtgacgtaccggttcagtcccgcgaagtcaagaacgagatcgacgaggacaagtgtgtcggatgcggagtctgtgccgaagtctgtccaggcgacctgatcgaggtcgacggtgtcgccaaggtgccggagaagtgtcccgcctgtaagctctgtgagcgcgcgtgtcccgtcgacgccatctcaatcaacgtctcctatgagcgctccggtgagatggagtgagttttttcacccaccccacccgctccgcccggggcgaacgttgcgggtagggacctacctggtggatggcacccctcgtcccgccgtgtttctcgacgacgaggtccacgtctacgaccttcccgtgctcgaattcatcgaagtcgtccacagtgacgggttgggtgatctggactactctgtgtatccgctatcggagctcagaataggtcccccagttccgcggcctcctaagataatctgcttcggactcaactaccgtgagcacgtcgaggagttacgcgaaatgggaatggacgtccccagtgagcccgtcatgaccatgaaggcgcccaccgcggtaatcggccacctggataccgttaagttaccgagggaggcacgcagggtcgatcacgagctcgagctggccgtggtgatcggagagcgatgtcgtaaagtgtctcctgaggaggctcgagacgccgttctcgggttcactatcatcaacgacgtgacggctcgtgacatagagaaaagagagggccaatgggtccgagcgaagagctacgacacgttcgcgcctttaggaccgtggatcgaaaccgaactagagcccgacggactcgaaatggagctccgtgttaacggcgaggtgcgccagcgtgctaccaccgacgacatggttcgggatccgtacgagctggtatctttcacgtctagggtgatgacgctcgagcccggtgatatcatcgctacgggaaccccgcccggtgtgggtccgatggaaccggacgataagatcgagttggaaatcgaacgcattggcaggctcgtacattacgtaggacagtgaataccatagagaccgcgtgacaccgtttagcgtccccacacagtttctttacgaacagaagaagctccggggagaactctcaaaggtagccgcgaggatcactgtaaggagtattggtattatacgtaagtcggcaatccggttattcgtcatcggggtaacctcggtcgggtccgctcgtcatctttggggggttggaaccatgacccgcgaggacaggaggaagcccccgggcgtagacgagctcgtgacggacgtcctccgatccaagcactggctggcagaagttcctaaggagatagtaccaccgaagcgcaagagacgtgctaagggattggggatttagtactcacggtagccgcgactcagcgactcagcggtgaaggctcgagcagtcctaactccactaaatactcaggtttcgataggtgtctccgggctacgggaggtgcctcgtacgtcactccttcgaccagctctcgaggtacctctactccgatcttcgagtcctccggagcccgttccccacaactgcacttgaacccttttttccgtcctgccgacttcatcgacctccgacaccgtccgcacacgggattgcggacctcttccacgcgctccagtctcagcacacggagcttttccacgttcaccgtgcgggggtgtttcggagtctccggtctcagcgcacccgccacacggatttcatcgccgggatgtagtgccgccacgacttcggtgagcggtcgggccggacgaaacgcggcgatatctaccctgacgccctcctcgtcctcacacctcaccacgacgtgacctcccggtattcgcctaggctcttcaacgaccgtgaggtctaggacggggttggagtagtcctcggcgtccgccaaccgatccacgcggacgaggtgcgcatccgtcgcttggttcgattcgaagatctcgtactccaccaccggctctcgcgtcttgatcatatccggagcgacctctaggacgtccggttccacggatctcactccgtagaggacgggacatggcgtgttgggcgttatgagcacgtcgccgtccctactatccagattatcgaacgttacggggaacgtcctacggtcgaactctctgatcgaactttcctccacacgccgctccgttccccagtacttctcggcacggtacgcgatcccctcgaacgtgacctcgtggtccttccggacgcgggcgaagcccagggccgcaacggcaccgacgataccgcgaccttctaggaccacgttgacgtcgtcgtcgacgctctctttcaccctcccggggtttaaaatgcgccgtaccgcctcctcgtagacggattcgcagaccctcggcggctcaccttcgcagaccaccagacccggccgggtctccgggtaacccttccggactaccttcttaagtgcacgtagcaccaccgcttcgatgtcgacgctccacggtgcttccaccggcagggcgaccgccgcgttacccctagtcttgaacggcacgttcggattcaatcgaactaacagcgggcgaccgacgggttccgcaccggcttccgccagctccgcacggagtaagacggccgcgtgggtggtacatcccccggcgggtgagtcggtgtcatcgagtgccacccaatccatcgaacgttccacccgggggtgatcatgtggtcgtcggtcagaagatattggcgtcggccgtcgcccacctcctgcctttcttggtgggcgccgtcgggatttacttcattctcacggcgtcgatgaaggacgacgagcacttgcgcaggttaggcttcttgatcatagtgatcgggggtccaacgtcggtactagtgtccatcgcgatagtcggggggtgacggggtgcgggccgagctctgtgcggacctcgaggaggctttgagggccggaggccacgaagtcgtccgcatcgaaagggcttgcttcgacatcttcgtgcgtacccgcgatggtcgcgcttacatagtaaaagtgttgatcaacgccgacgggctgcgccgggaggtagccgaggagctcagacgcatttcgcacttcttggaggccgtaccggtggtcgtggcgcttaaacgccacaccggcccgctggagaaaggcgtggtctaccatcggtacgaagtccccgtgctcgacccgctgacgttcgcccggctcgtggagggggagccgccgaaggccgtggcggaccggggaggacagtacgtcgtgatccgtgccgacgaggtggatgaactggacgtatctagggtgcgccgtcgccagctccggcgtgagggcggtaggatcacactagcacgggccgaggaggccgacgtcgagggggtaccggtggagctcaagaccccggaacacgtggacaccggacgcgaccgaatgacgcggttcgagcgccgtgtagcggagctcttggaacggatgggtgccgaacgtacggggaaggttcgcagggcccccttcaagctcctggctaaggacggcgagaccgtgctggcacgggcggaggaggggggagaccgggagtccatagctctcagggatgtggccagtgctacggggtcgatgggtgtgatcgtgactcgagagcgttgcaaagacacgtacgtgcccacgatcgacatcgggaccctcgaggagatcaaggacctcgaggacctcaaggagtacctccaagagcgcgatccggaggagcgtgtgagacggctcgttgaggaggccggcataacgtccccgagggagatagcgcaacgcaccgggatccgtgagtcggtgatacgagagttcctgcgcaggatggggatcaccgacgagagaaaggtttaaatataagtgctcatcggtatgcggatggacgaaaagaagccggaaacgggggagtccgcgtatggcgatgctagcaggtgatgggaggcaggttctgatcctgccggaaggttaccagcggttcgtcggtcgagacgctcagcggatgaacatcatggccgcgcgtgtggtagccgagacagtcaggaccactctaggtccgatgggcatggacaagatgctggtcgacgagatgggcgacgtcgtggtgaccaacgacggtgtaaccatcctggaggagatggacatcgagcacccggccgctaagatggtcgtggaggtcgccaagacgcaggaggacgaggtcggtgacggtacgaccacggccgtcgtgctcgcgggtgagctgctgcacaaggccgaggatctactgcagcaggacatccacccgaccgtgatcgcacgcggttaccgaatggccgtcgaaaaggccgaggagatccttgaggagatcgccgaagagatcgacccggatgacgaggagacgctcaagaagatcgccaagaccgcgatgaccggtaagggcgtggagaaggcccgagactacttggccgagctggtcgtgaaggccgtcaagcaggtcgccgaggaggaggacggagagatcgtcatcgacacggaccacatcaagctggagaagaaggagggtggcgggctcgaggacaccgagctggtcaagggcatggtgatcgacaaggagcgagtgcacccgggtatgccgcgccgcgtggagaacgccaagatcgccctgctgaactgcccgatcgaggtcaaggagaccgagaccgacgctgagatcaggatcaccgacccggagcagctgcaggccttcatcgaggaagaggagcgcatgctgagtgagatggtcgacaagatcgcggagacgggtgcgaacgtggtcttctgtcagaagggtatcgacgacttggcccagcactacctggcgaagaagggcatcctggcggtacggcgtgttaagaagtccgacatgcagaagctggccagggcgaccggagcccgcatcgtgacgaacatcgacgacctgagcgaggaggacctaggtgaggccgaggtcgtcgaggagaagaaggtcgccggcgacaagatgatcttcgtggagggttgcaaggacccgaaggccgtgaccatcctgatccgcggtggtaccgagcacgtggtcgacgaggccgagcgagccatcgaggacgccatcggagtcgtggcggcggccctagaggacggcaaggtggtagccggcggtggtgctccggaggtcgaggtagccaggcagctgagggacttcgcggacggagtggagggccgcgagcagctcgcggtcgaggcgttcgccgacgcgctggagatcatcccgaggacgctggccgagaacagcggactcgacccgatcgacgtgctggtgcagctgcgcgccaagcacgaggatggtcaggtgaccgccggtatcgacgtgtacgacggtgacgtcaaggacatgctcgaggagggcgtcgtcgagccgctgcgagtgaagacccaggcgctggcgagcgccaccgaggccgcggagatgatcctgcgaatcgacgacgtcatcgccgccagggagctgagcaaggaggaagaggaggaggaagaggagggcggtagcagcgagttctaacgcccctctcccgaacaaacatgccttcgcaccaatcgttttggatcacataacgttttcgaggacgcgctcagcggaaccccttggccgcgctccacattaggaacaacataatcagcatcatcgccagtgccagtactgccacgatcagtgccattttcggggagcttcccacaactatcggcacgggaccgatcaggatcactccgccccactctcccctacccgaagcgttcttgatcgctaacaggaggatagccagtgctgtcagaactatgcccacgaacgttatcagcacaccggccttgaggacgtcctcgactcgcagggctatcacccctcggggggcgcgagtgtggggttgttcgagaagtacgtctccaacttgaaccgccttctgatcctcacgatggtgttcgctgtgatctgcgcaggatccaccctcgccttaggggtcaaaaagggcattgatctcaaaggaggtaccatggtgatcctgaaaacggagaaggatcccgatacggtaactagcgaggcttcgaggatcctcggcgtgtccgacgtggaggctatacgttcctcccaaggcgacgtgatcgtgcaggttcctaagtatctgtcggcagatgacgtgaataaactcgcacgggccgtcggaggggaggtcgagtccgtccagaccatcggaccggcactgggccgcgtgttctgggagagcgtcaaagtagccgtaccactggcgctggtcgcggtctccatcgtcgtgttcgccatattccggaaaccgctgctgagtgccgccgtgctgggagcgctggccttggacctcgtcgacgcgctcggactgatggcactcacgggcgtaccgctgaccctggcgagcttcgcgggcctccttatgatcataggttacgcggtcgacagcaacatactcctctccatgtacaccgtgaagcgtcgcagggtcaggagggtcgatcgggcgatcgcggactcgtttaagacgggtatcaccatggtagccacgaccaccgcggccgcatgcgcgctgttcttgctatccatgtcggaagccatgttcgaaatcgccgccgtcgtgatcttcgggctaatcgcggacgtccttaacacgtggatcttcaacgcttgggtcatccgcgagaagatcgcggggaggtgatctttgtccgggctgggatggatgaaagagaactggagactactcgtgataaccgccgtgtggatcgtagcagcgacgtctctcgcggtgaagggagtgaacctaggtctggagcttaaaggtggcacgatggtcatcgccaagacggatcacccggttagtaagaaagagatggatcagaccgtgacggtactcgagagtcgtctctctaccttcggcttcaaaggcatcaagatccagccagtcgggcgcgaccacatcatcgtgatgcttccaggtacaccgcccaaagaggcggtcgagctcatcactaagccgggacgtttcgaagccaagtacaagggcaaaaccgtcatcaccggccaggatatagagtcggtggagtctccgaggatagagcgcgttgaaggcggctaccagtggtcggtcccgttcaggctgacggcggaaggcgcccgcaagttcgcggaggtagccaagaacgccccgggccagccgatcgacatgtacctcgacaacaagaaggtgtccagcccgcggatctccgaggacctggccatggccgcggcgtccggtcacatggagcgggagatcgagatcgtaggtggtgctaagaccaaggagcaggcggagcgtgaagccaaggagatcatggcggtcctgcgttccggtcagctgccggcgaagctcgttccggaaggtgtttactccgtgtccgccacgctgggccagaacttcctcaagatggcgatgatcgccggagcgatcgcgttcgcggcggtgtcggtaatcatcgcgctgaggtacagggacatcaggatctcgggtccgatactgttcacgggatcctccgaggtggtcttcctcataggtctcgcctcgctgacgggtttcacgatcgacctgcccgcactggcgggaatcatcctgtcgataggtagcggcgtggacgatctcatagtgatcaccgacgagatcgtccgcggtgagcgcaggaaggaggaggttacactccgtcaacggatcaagcgggccttcagcgtggtactggcgtcgttcgcgacactggcggcggcgatggcggtattgttcgtcgccggtatgggcctcctgaaggggttcgcgataatgaccatcgccggagcgttttacggtgtcgtcatcaccagaccggtgtacgcagacctgctgaagaagatactcggaacggagtaggggggaggtagaaacggacccgatcgtggacgtgaagctggtgagcagtatcctaggaaccgtcgtgaaggtcgccgccgtgctcccgctactccccctcccgatttcgctactttacggggaattagactgcatcgctcctctcctcttgacttccctcatcatgctcgtctgcggggtcgccctcgagcggatcgcgagggttgagcgccacgttcgtccgagacatgcgatagttgccgtgcccataatttggctcgtgatcccactcttcacgtcgcttccttaccgtttttgcgaacacatgtcgtggctggacgcttacttcgaaagcatgtctggatggactacgacaggtctcaccgtgctcccggacatcgaccacgcgcaccgcaccatcctgttctggagaagcctcgagcagtgggtaggaggcctgggtatcgtcgtgtcgattatcagcatcctcaggttcgaaacaccgagccttctgtacgtcgccgaggcccgcgaggaacggatcagaccgaacgtcgttaacacagcgaaagagatgtggaagatctacatcacgatcaccgcggtgggtttcctagccctgtgggccgcggggatgaatcccttcgacgcgctgaaccactccatgaccgcggttgccaccggagggttctccacgcggtccgagagcgtcaccgcgtggcactcaccgaccgttgaactcatcacggtcgtcctcatggtgctcggtgccaccagcttcgtcactcactacagggtggccaagaccttccgtacgtctcccgccgaacttccgaagcggatcatcaaggcacttcgacagtacctccaagatcgtcagttcctcaccatgatcggtctcaccgccgccgtcaccgcgtatgcgggcgcggtatccggcgaccgagcgtgggacgtcgtccggtactacgggtaccaggcggtgtccgccatcacctgctgtggattctccaacgcggacgttctctccttccccgagtacgccaagctggctataaccatcctcatgatagtcggaggatccacggcctctacggcgggagccattaaggtcttgcgtttcctgatcatggcggaggccgtgaaggcggccatcgcacgtaggactcaacctatccgaggcgtggtcgtccctcgcatcggcagtagggtactctccgaggatgagatctccgacgcgttcgcgatcgcctcggcgtacatgttcttcctgctcataggcacgctgctgctcacggcgtacggatacccgctggtcgacgccctgttcgaggtcgcgtcggcacagggcggcgtcgggctgtcctcggggatcacggcgcccaacgcgccggcgttcgtgaaaatcctgcttatcttccacatgtggataggcaggctggaggttctgccgtgcctagcggccctctactggctgaccttgatcctgaagaggctcgccgtcaaaggtagggactgatcccctcgccctccagggtggggttctccgggggtcgtgaggggcatgtacgtggtggtcgtggggggcggacgcgtcggtaggatactggccgagttgctgatagctcacggtcacgacgtcgtcgtgatagaaaaggataaaaggagagccagggagctcgcgcagtccgaactggacgtcctggtcgtccagggagacgccaccgacctcgacgtgttgcaggacgccgagatcgagacagcggacgtcgtcgcggccgtgaccgataaggatgaggttaacctcgccgtgtccctgatagccaaggaggaattcggtgtcgagcgggtcgtatcccgcgtgactgatgaccggttcgtggacgtattccgacgcctaggggtggatgcagtcgtaaaccccgatcgcagtgccgcgcaactcatagagaaggcgatcacgaggcataatctcgtggatgtgattatgttcgggcgcggcgaggccgagctcttggagttcgaggtgaccgaagactctctggtatccgggaagaaaatctcggagatcccggccgactgcgtgatagtggccatatatcgggatgacgagctggagctaccccgcggcgacatggaaataaacccgggtgatcgggtcctcgtgctcgcgctacgtgacaagctcaagaaggtcgagaaactcttcaaaggccgcgacgaaggggagtgacccacatggcgtccgttgctcaggttctagaccgtatccgatccgccgaaaccgaggcgcagcgcaaggtcgaggaggctcgtgagaaggccgagaagatcgtcgaggaggccgagaaagaagccgaggaaatcgtcaggaaggcccgcgtggaggccgaggaggaggccgagaagatcctccagcaggcgttgaaggaagcccgtgaggaggcccgcaaagtccgcgaggagggtgagcgggagatcgaggagctccgaagtcaggctgaggagagactggatgaagccgccgatgccgtcgtcgggctagttctgggggagtgaatagtggccatcgagccgatgcgtgaggtcttcgtgttctgcctggacgagaaggtgtcggacctactcaagcgggttcagctcgagggttgcctccacgtcgaggatttctgggaggctcacggcgtcgagaagttctacggtgtgaaacgcccggaggtacctcaggaactgatgaagctcaccgacgtactcacacggcttgcgaggatcgaggaatcgctccgtcgcatccacgaggaagtccggtccaccgggctactcgatgcactgaaacccatgttcaaggcggagcggcctgaaaccgtggagttcgagctcaagccgaccgaagagatcgtagaggacgcgaacgagttcctcgaggagctggagtccgaggccggggagaaactgaagcgactgaacgagctcaaggacgagctcgagcgactcgaggaggcgtgttccttcctggaatacgtggaagaggacttcaacgtctcccacctgggtgaaggaccgcgcgtggtcgctcgactctacaccgtgcgggccgactcctgggacgatctagtccaggagctcgacggcgaacccgcgtacgtggggaaggtaggggagaccgaagacggcgatcccatagccgtgatagcgttcccgaagggtagcggaatagagtccgaaatccgcaggctcggagccatggaagaggaggtagtgaacgaggtcctcgaggatcgtgaaggttccgttcagtcggtccgcgaggagttggctgaggagatagaggaagtcaaggacgagctcgagcgaacgaagcatgaactcgcggaattctacgaggagcgtggtacggagatccgagcgtgggtggagcttctggagaacgagcgcgagctgttcgacgtgttacccaagctcgccatgaccgataggacctacctgatctatggctgggtgccggaggaggaagtcggcaggttcaaggaggtcgtgaaggaggctaccgatggactatgcgagatagtagtgcacgagccgtcggacctcgagaacatgcccgtacgcctacgtaacccgaggttcatccagcctttcgaaaccctcgtggagatgttctccctgccgaagcccacggagatcgatcctacaccgatagtggcgatattcttcccgatatacttcggtttcatcctgacagatgccgcctacggggccatcctcacagcattggcagcagcgatccgtatgggagcggggcgggtcgatgagagcatccggaaattctccgagatactgctgtacgcgggtatcgttacgatcatcctcggtgcactcaccggcggttacttcgggaacctgttggggatcaaaccgctgtgggtagacccgatgaaggacccgatcacgatactcatcgtggcgctgggcttcggagttctacatgtcggtatcggattgatgctcggaatgtacgtctccctcagaaagcagcgtgacatgaggtccttcatgctcgactacctgtgctggttcctgatcctcctcggcggtctgctactggcggtggcgtacaagacgggcggaatctacacaccactcggatacgccggaatcgccatcgcggggctgggcttcgtcctcgtactggccggtcacaagctcctgggtgtcctggacaccatcgggttcatgggtgacatactatcctactcacgactgctagccggatgtctgtcaaccgccggtatcgcgctggtggtcaacctgctggctaaaatggtcgagggactcggtgtagtggggtacgtgatcgcggggatcatcctcatcggtggacacttgttcaacatggcaatgaacggacttggagccttcgtgcacagcctacgattgcactacgtggagttcttcagcaagttctacgaaggaggcggaaagccgttcgaaccgctagagctcaagggtgagcacgtagaaatacgcgcttgaggggggaaatccggatggtgagtaccgaactcacgatcgccgccatcggagcgggtctggcggccggcgtcgcgggtgtgggttccggtattggtcagggtatcgccgcggccgccggtgccggggcggtagccgaagacgaagcgacgttcggtaaagcgatcgtgttctcggtgctcccggagacgcaggcgatctacggactactcaccgcgatcctgatcatggtcggaattggactgctcggagctgcgaaggccgttaccgtgggtgccgcactagcggccctgggtgcgggtctcgccgtgggactcgccggtatatccggtattggtcagggtatcgccgcggccagcggaataggggcggtactcaaggatgaagccctcttcggtagagccatcgtgtacgccgtactaccggagactcaggccatttacggactgctagtggcgatcatcatcatggtcggctccggtctgctcggtggagccggtggtaaggtctcactgggagcgggtctggcggcgatgggtgccggactggccgtaggtctggccggaacgtctggtatcggtcagggtatcgccgccgcgagcggcattcacggcgtgctccgcaaggaggagctcttcggtaggctgatcgtcttctcggtgttgccggaaacccaggccatctacggactactcaccgcgattctgatcgctaacttcgtcggtctgttgggaggtcccaccagtgtttcagtcggtgcgggtctggcggcgatgggtgccggactggccgtaggtctggccggaacgtcgggtattggccagggtatcgccgcagccagcggaatcaagtccttgatcgaggaggaaggagtgttcggccgggcaatcgtcttctcggtgttgccggagactcaggccatttacgggctgctagtggcgattttaacgctgttctcactactcaagccagatctaagtctcgcggccggactcgcggctttaggaatgggtctcgccgtcggaatcgcagggacttcaggaatcggtcagggtatcgccgcggccagcggaatcgcgggggtcttacgtaaggaggagctcttcggtaggctgatcgtcttctcggtgttgccggaaacccaggccatctacggactactgaccgcgatcctggcgatgttcttcctgggtgccggaaagccgacactggccgcaggactggccgccgtcggtgcaggtctcgccgtgggcttcggaggaacgtctggtatcggtcagggtatcgccgccgcgagcggaatcagggcgatgatagagcgcgccgaactcttcgtgcgagggatggtcctctcagtgctcccggagacgcgagcgatttacggactgctgatcgctatcctggcgctcttcatgatgaaatcgggctccgtcggtgccgggttagcactcatcggagccggtctggcagtgggtctcgtgggtgtttcgggaatcggtcagggcttcaccgcggcgacgggtgccgccaccctagtgaagaacgagggcttcttcggtcgagctatcatcttctcagtactgccggagactcaggctatctacggactactgaccgcgatcctgatcatgatgttcgccggcatactgggtggagcgggagctaacatcggactgggagcgggcctcgccgcggtcggtgccggtttggcggtcggattagcgggtagctccgcgatcggtcagggtatcgccgcggccgccggtgtcggagcgtccgcggagaaggaggagctcttcggtagatcggtggtattctcgatcctgccggagactcagtccatctatggattactcatcggcatcctgctagcggtgttcgcgatgaaggccggttccccggtgggcgcaggactcgcggctctgggagcgggattggccgtcggaatcgccggcttctccggtatcggtcagggtatcgccgcggccgccggtatcggagcgttgaaacgggatccgggctcgttcggtcgctcgctgatcttctcgatcctgccggagacgcgatccatctacggactgctcgtggcgatactggtgatggtcggactcggcctgatgggaggtaccttcagcggtaacgaggccgtcggcctagcggccctcggcgccggtctggccatcggcttagcgggtctgtcgggagtcggtcagggagttacggccgccacgggtatcagcaacgtggtgaaggaccccggaatgttcggtcgttcactgctcttctcggtgtttccggagacgcaggcgatctacggactgctgatcgccatcctaatcatgatgttcgccggtatactcggcggctccaagagcccggccttgggtgtgggactcgcggccctcggtgccggtatcgccgtcggtatggccggtacctcgggtatcggtcagggtatctccgcggccgcgggagctcgggcgaccgccgaagatcccggtaacttcggtcggtccatcgtgttctcgatcctgccggagacgcagtccatctacggattgctagcgggaatcttggcgctgacaccggtgctgacaggggccggagcgcacttggcggccgccgccggtctgatcggtatcggcgccggtctcgccgtcggagtggccggtacctcgggtatcggtcagggtatcgcggctgcgggaggtaccggtgcactcgcggaacgtacggagatgttcgccaggtcactgatcctgtccatcttgccggagacacgatccatctacggactgctgatcgccatcctgagcatgtcactgacgggagtactcggaggcgccggcaaggcgagcctggccgtaggtttcgcagccgtcgccgccggaatcgcagtaggtttcgcgggactatctggaatcggacagggtatcacggcggcccgcggttccgcctcgatggtgagacgggagcaggtgttcggaaagtccctcgtgttctcggtgctcccggagactcaggctatctacggactactgaccgcgatcctgatagtgttcgccgccctcgcggcctcttaaccaccatattctcagctgagttggggtgttacacatgggcgtagaggagctcgagcgtaagatcctggaggatgccgagaaggaggccgaagagatcctcgaggaggcgaaacgagacgcggaacgtatccgtgaaaaggcggagcgtgaagccgaggaggtgcgtcgagagattttggaccgtgctcggcgtgaggctgagacccgacggaggcgcgagatagcgcaggccaagctggagatccgtcaggagaggcttcgggttaaggaggagtacatcgagaaggcgatcgagcgggccgaggagaagatcagggagctggcggaggagggtcggaaggagtacctggagttcctcaagcgttccgccatcgaggccgtgaacgcgatttcctccgatgaagtcgtgctccgagccaacgagaacgatctgatgctgctggacgagatgctctcggagatccgcgacgagaccggtaaggacgttgagctgggcgagccagtggaggccgtgggtggtgtgatcgcggagagtaaggacggctccgaggcgtacgacaacaccgtcgatgcccggctccgtcgccggcgctccgagatagttagacgggtctcggagacgctcttcgggggataacctttgctaggactggccggcctgcaagattacacccttctcgccgtcgggatcatcgcgctggtcacggtgctctcgataatcttgtccataccgatcaccgacgtcgtttggcggtacgccccctacgcttacccgctccccagggccaaggccgtcgaggcggagacgctatccgacgaggattacgaggaactcaaggacgccccggtgcgggacctggtcaccaggctcgaggagctcggagtcgagcctgaagcagcccgggcggtactcgacgggaacacggctccactcgagatagagctcaagcgccgtgccgtcgagtccgtgatggagagaatcgtcgagaccagcccggaggacgtttccgagctggcgcgggccctgatagccaagtacgagctagaagacatcaaggcggtactgcgtgcgcgccatgcgggtgaggaaccaaaacacctcgtggacgcgcccgtactgctcggagcggaaacctggcgagagctaaaggaagcgcgctcagtcccggaggtcgtagactacctacgcggaactccgtacgatcgcggattagaggaggccctgcgtgagtacgaggagacgggctctctactaccgctggagttggcccttgatagggcttattacgagcacctgtgggatctggtggtaagcgagaaggttgacgaggaactggccaggctggtcggccttgagatcgacctatacaacgtggaggtcgcgcttcgaggtgcgatcctgaacctggacccggaacgtgtgctcgaggctatggcggaaggcggctgggagctggccgagtggaggaagcgggagctggcggaagccgaagatcccctagaggtcgtcgagagactctcagggacttccctcgggccgtacttggaggaagccgccgaggagtactcggaagggcgtggagttcaggtcttcgacgaagccctccgtaaagcccgctacgagctggcccgagagatcgcggggtccgatctcatcggagcaccggccgtggtgcacgcggtgtacgagaagcagcgtgaggtcgataacgtgatctccctagtcaacgccaaggtggcggacgtcgagaccatgttagtgtagggggagccacccgtgtacgtagtagccgccgtggtgaacgggtccgtcgcctcggggttcaggctcgtcggcgtgcgaacgatcgacgcggaccgtgaggatcctaaggaggccgtgaagaagctcgcttcggatccggaggttggggtgatcattctcaccgaagatgtggccgaaaaggtgaaggaagaggtagaggagatccagcgggagaaggtctctcgaggtgaagctactcctattttcgtgaccgttcccggaccggaaggcccaaccgaggagttcgagatcgaggagatagttaaaaaggcggtaggagtggagatcgacctcgaacgcatcgagcgttagggggatcttccgtgtccaacagcgtgaaaggcgagatagtgaagatcgcgggacccgtcgtggaggcggtgggttgtgagggcgcgaagatgtacgaggtgttccgggtcggcgacgagggtctaatcggtgaggtcatcaacatcgagagcgaccgggctactatacaggtctacgaagaaactaccggtctgcagcccggtgagcccgtcaagggtaccggagagctcctatccgtggagttaggtcccggactgcttactcagatcttcgacggaatccagcgcccgctgcccgagatccgtaaggaagtcggtgacttcgtcgagcgtggtatcctcgtgtcggccctggaccggaagaagaagtgggagttcactcccaaggtcaaggagggcgagaaggtcgaagagggcgacgtcctcggaaccgtgccggagacggagttcatcgagcacaagatcatggttccgcccggtgtgtccggtgaggtaatcgagatcgcggccgacggagagtacaccgtggaggacaccatcgccgtcatcgaggacgaagagggcgaggagcacgaggtcaccatgatgcaggagtggcccgtgcggaagccgcgaccttacaagcgcaagctcgacccggaggagcccctgatcacgggtcagcgtgtcattgacacgttcttccccgtggccaagggtggaaccgccgctattccggggccgttcgggagcggtaagacggttacccagcagcagctggcgaagtgggcggacgcccaggtagtggtgtacatcggatgcggagagcgtggtaacgagatgaccgaggtgctcgaggacttcccggaactcgaggacccacggacgggtaggcccctgatggagcgtacgatcctggtagcgaacacgtccaacatgccggtggcggcccgtgaagcctgtatctacaccggtatcacgatggcggagtactaccgggacatgggctacgacgtggcgctcatggccgactccacgtcgcggtgggccgaggcgctgcgtgagatctcaggtcgactggaggagatgccgggtgaggagggttacccggcgtacctggcctccagactcgccgagttctacgagcgtgcgggtcgcgtcgtctgtctgggttccgacgaccgagtaggttcggtcaccgtggtgggtgcggtgtccccaccgggtggtgacttctcagagcccgtaacgcagaacacactacgtatcgtgaaggtcttctgggcgctcgactccaagctggcggaccgtcggcacttccctgcgatcaactggttgcagtcgtactcgctgtacctggacgacgtcgagaagtggtggcacgaggagatcggtggtgactggagggagctacgcgacgaggctatggagatactccagcgcgagtcggagctggaggagatcgtgcagctggtgggaccggacgcgctgccggagagcgagcgtctgatcctagaggtcgcgagaatgatccgtgaggacttcctgcaacagaacgcgttccacgaggtcgacacgtactgcccgcccgagaagcagtacgagatgctcaagaccatcctgcacttcaaggagagggccgaggaggccgtggacaagggagtgccggtggacgagatcctcaagctcgacgtcatcgacgacatcgccaggatgaaggtgatacccaacgaggaagcgaaggagaagatacaggagatccggaagaagatcgacgagcagttcgaggagctcatagaggaggcctcgtaaatcccccttctctccctcggatcgttacgggggtcgtaacgtgagagagttcctcgtactgttcaaccacgcccctacgtcacccgaccgcgtgcggctcaaggaccttcccggctccggacgcttcgatctggtgtgtcgcgttacgacccaagctctactgtactcccacggggttcgaacggacacggtggtacatctcctactgcgcggtcccgacgatcccccgaaaaccatcaccgtgacgggtcgccgtgtgcgccgtttgtacccggacgagcgtaccaccgcgatccatcttcgacgcgccctcgaggcagacccggacaccgaaccccatcccgggatcttcgtccgtcgcgcggacctcgaggatctgctcggtgagatgaaaggtgccaagctctactacctgagtgaggacggtcgggatttagaggaagtggaaccggagcccgatgccgtgttcgtcctcggagatcacgagggtcctacgccggagcaggatcgtctgttgagacggcatgccgacgccgtgatatcgctcgggccgatcccctatcacgccgatcaatgcatcgtgatcttgcaccggtacctggacgtgaaacggccgcctgaatacgctcacggcccctcgaacgttatgtaatccgtgacgtactcccgtgcgctttcgcaaaactctgtcggggaaattgctaacaatcggtgatcggcacggtagtttagatacgggggcaccgatgcgacacctctaccttacggttctccccgatcgcaccctcttcgcggctctagacgaagagttcttaccggaacgtgcctatctcagccaccgcggtgacaagttcaagttctctacggaagagaccgaactcagccgcgagatcgaagacgagaccctgttggaggcccgtaagacgttggagcggaacgtgggggaggtcttgggggagaaacctagactactgcgcgttgaagagagggaagacctacccaagggacgcgcggtggaggtgtacggtcggggagggaccaaggagatcttcgttggaaaggtggagctaggagaggaggttctactggcctcgcgcggtacgggctccgaggaggccaaagaggtcacggaagtcgcggaacgtgtgctcagcggcctgctcggtcgcgttatcgacctttactactcctgaatcttccgttccaccgaccgcaccttaccctccgcggtcagctccttgtccctgcgctcgtctatcttgactacgaacacggcacggtccacgacgcgtaacgcggcctccctagcgacgcggagcgcctccaaagcgtcctcgaaggtttccacctccaccacggtacccatcgggcctacctgcggctcgaacccggcttccttcagggctttcactacctcgactatctcatcactgacgctcggtgatccggttccgatcgggtagaacgaaatctccatcacgaccgccacgggttccgccccctcggcatcagaatcaacgggagcacggataaaggattgaagttaccacgcggtccggtgatctcgacgatcacgtcgtcgtagtccactaccccgtcccaaccatcctcgaacccgaacctcaggtaccatacaccgtgctcgcacttggtcgacccgcgacacgcgtctaccctccgtccgacgacctccgtcgtccacgctattatggcgccgtcgaggaatgcccggagttccggcgactcttcggccaacttcctgagcacctcggccgtctccgcgtccgagcataggacagtgtcttcacctttcagcgcgatgccgagacgttccgggtgcacgtccagtgttccgataatcggtgaagcttcaccatccggggttattcgtatcactgagcccgtggaccggtccagcaacaaaacgtcgtactcctccggagattcgcgcttgatcgagatcttcaactcccctaccgagaccacgaccgcctcaagggtcacctctatgacggcatcgttgtagtcggcgtcggtcccatcctcgaacgcgaactcgaacccgtccggtgtcctcctgacgatacagcaaggcctaccctgtacctccgtcgtcacgatcaccggaccgttgaggatcgttcgcagttccggacgatccaacagcctccggaacgtcgccgcggtcgtggggtccgagcacagtgctactcccggccattcaccgggcttgaacgggatcacgacggcacccagtgcgtccggatgcacctcgcccggtatcaacggctcaggcttccgcagtgtacgctcaaggacccacggtcgcggtccgggcgacgcgtcggtgcccaggtaccagagcgctccactggcgttgtccaccaggaatagatgatgtgtgtaaccgctttcacgcgatatccataccgctccgagcttcatccccgagcatccaaccggtgatatcaacaacgctagcaaaaacaccgttagcatcgccgctcccccgatccgtggggggtaacctacgtgaccgttctggtttcgactcttgcactgggcgattggtgggcagatccggagcgcgtgaacgagctacccgagctgacgggaagcgacggtgttgagctgatcctcgaagggtcgtttcaaccggggcggctcgatccgaacgaactcaacgttgaggtctcctcggtacacgctcccttcgccgacttaaacccagcgagtccgagcgatcatcaccatgagtacatcctggaggtcatccaacgggccgctgagctcgccgcggagctggatgctcactacctcacggttcaccccgggcacttgacaccggtgacgatccacgaccgagaactggccatcgagctcgccatcgagaccttgggagagctcgccgacgaggtccgctcgttcggtgtcgagccgctcgttgagaacatgccggatcactcgctactgctgggcaccagtgcggacgagatggaggagatactccgggcgtcggggtgtgggttcacgctggacgtcggtcacgctctgaccgcggagggtagtctccgtccgtacctgcggttgcggcccgatctcctccatgttcacgacaactcgggcgacggcgacgagcacctaccacccgggagcggaatcttagatttcgaggagttgcgaagggcactgcaccaccgggtgctgcccgtggtggaagtccgggggatcgagaaggcacgtgaggctgtgaggacggtccgcgagatcatggaacgtcctgagaactgaaacgatacgtgtgggcggtgggggaaccgccccactagatttcaacaattctgcctatggcgtacgtgtcacgtactgacactattttcactagcaccttgtcacccttctccgcttctggtacgaatattacgaacccattgaccctcgcgacaccgtcacctcgcttccctgtgtcctcgatctttacctcgtagacgtccccaacatccacgggcttgtccttcccttccaaaccttcacacctccttcaccgagaacgcggatttccgggaattcacattacttatagttttcccccagcgtgtctcccgacggttcagatgcggacacgggacgtagtccgttggcgctcgccgcctgctactcggtagcgatggatgatagtacgaagaccggccgagtcgatatgctggccgtcgctcgggtgaacggtcagtcggctttccgggccagaccgtccaacgctatcgcttcaccgtcaatcagaaggagggggttcacgtcgagttcggaccatccttcctccttgtacaccccgtgggctgcgttgacgacttcggcgaggcggttagggcctatctcggagagtaatcgttcacctccgggcactctacggaggcccctctcgacgtcctctccgtcaaccgggggtcgccgcacgatgtaggcccgaagttcttcgacgagcttcccgccgagaccgagcagtacgacggtaccgaaagtgtcgtcttcctttatccctaaaaaggcctctatgcctttgaccacgtccaaatgttcctgaacgatgacaccgactgcgtcgggccagcgctccaacagctcggccacgcgtcgttcgagccgctccttggacggtacggccgtgtatatggcaccgacacgggcccgatgcgcgactcccgaatggaggagcttgacggtgtaagggggatcgaacggtacgtcggaggcctcctcggggcgctcgaggacggtgaagcgtggcgttttgagaccgccctcacgaagcgcggtaagcacatcgtgctccagaacgatctcagagctcacgacttgatcaactcccccataacctcgttgaaggcctcacagaaccgctctatgtcctcccgtggggccgaaaacgccactcggatgaaccccttaccgcggcgtgggctggtatagtagcccgtcctcacgaagataccgtgctcggagtacagtttacccacgacggttttcgagtcgatatacccgtactcggagaagtcgatcacgagacagttggcgtgcgaggggtacaccggtatcttcactccgtctccctcacactcgcgcttgatcagacgctggttccgcgtgacctccctgagcagtctcgggatccatcgatcgcgaaccttcaaggcggtgatggcggcctcctgagctatcaggtttatccctaacttgctcaccttgtacttggatacctgctccagcagtttccgctctccgatcacggctccgatccgaaggccggcgagtccgtacgtcttggagaaactgtacaggtcgacgcagcgttccgggtccatctcgcaggctactggttgctccggagcgaagtccctgtacgtgcagtcgtgtaccaggaatgcgtccgcatcttgggcgagctccacgagaccccggagctcccgctcggacatggagctgccgagcgggttggaagggtttattacgaaaatgagatcgagctcccggaggttaccatcgaactcctccatcacggcgtctaccgtcatctgatagtcgaactcctcggagtatatgtcgacctcttggacgtgaactccctccgccatcatcataccgtcgatcgtcttgtaccctggatccggagtcacggccacaccgttgctggcgaacgccctgatgacggcgtggacgccctcgatggcgccgttggtgatcacggcgtcgaaatcgtcgtcgagttcgaagtactccaggagtccctctcgaagtcgccggtcgccctgcgggtgtgcgtacacgttgtacggtgcctccagtgcggcgcgcacgaccgctctacggacctcctcggggggtcccagtcgattggtgttctggccgagctctatcacctcgccggaatgtatcttccggaatagttcgtccggtgaatcgggaatccagtcggctgacaccggccccaccccgaggactttagaccgccagacttttgtgtaaataccgaaaggtattgggggtatcgagatcgcgcctcagcggccgcgcccgtgacatcttggaactggtagtgaacaactccgggatcaccgtctcggagatctcgagacggttaggactccatagaagtacgctggatcgatacgtcaagattctcaaagatctaggactcgtcgagactaaaccggggcgtgggggtggtgtctatccgaccaaggacgccgttcttctcgtgcgatcgggtggtagggtcacgatcgtccgacgcggtggcggtcgcgcgaggatactgatcgaggccgaagatcggccgggattactcgccgacgtcaccaaccggttggcgagcgccggcgttaacatcttagaaaccgagctcaaggtggaagagggaatcgccatcatggaattcgaggcggagaacgtcgttcacgaggaagtccttcaggaactcgacggactgagcggtctgatccgcgtcgaagtcgaaccgcgggggcgaaagtaatctgccgctcactcccgccgaggcgcttctggagatcctagggacggctaacgtcctagtcccgagatcgtacaaacccggtaaagccacaggccgcgcagcggtgaaccggttcgcactgtacgccgtccgcaagggactagggttcgaggtcgaagagagacccgtcagagtctacacctcctggcgtgggctgtcgctcgcggttcccggcgaggagactacctccgattaccgggcgacgccgaggggtcgggacgtacctcctgaagagctcgcggaggcagtgcccgactatccggcccgtccgcatttcgtggtagactaccggttctggggtgagcattccgacttcggccgcaccaacctgatacgtcaaaccgccgtgacagcttcgacgctccgactgtacctttcggaccgtcatatgagcttggtcaacgtcacccccgaagccgaggagaggttcctgaatgcctttccttccttcgagggtgggttgtacgaggactgggaggacctgatcgccgaactcagtgtggatagggtcatcctcttagatcccaacgccgaggaggaactcgacgagaacgagatacgcgaggacgccgtcttcgtactgggtggaattgtcgacgagaatatgcgcggatggactgcgaagctggctcccggcatcccatgcgacgttgagcggcgtcgtatcacgctcaggggtagcatcatcggagttccggacaggatcaacgcgctcgtggaagctctctcccgtgtaatcgtcgaaggtgagtcgctggagcgggcgatcctgcgggtacaatcaccacggttcgccagacgacgtctgagcagggaactgcgtaggctcgacaggctcacggaggaggagctgcgccgactgcgagaagtagttaacctcccgaagcgtgagatactgcttgaggcgcgccgccgggggatcgagctgaaggttgacctgcaggatggctgagctcgggtacgagaaggccgagagatgcgaggtcggagagaagcccgcctgtaaagtcggcttacgtgatgggaagcggttgatacacgacgcccatctatcgcgtcccgagcattactactccgtgtaccagagctgctgcaactgggaatgtttgttctgccattcttggcggttcacacagcgtcccgtgggtacgtggtggagccccgaggacttcgtccggcacgctctggagtaccgtgagaccgtcacagtctgggagccgcggagccgcgccacatcgtttcacgccacggatctatgcctggggtgcggtcggtgtgtgacgttaggcgagaggccggagtggtgcccgggcgagttggacccggatcaagtggtccccagccctcaaggatgggggcccgcacgcaacatcgtggcgttcacgggcggtgatatcgcgtgtcgtcccgagttctacgtcgaatcgataagggggctcaagtccgagacggacgatctctgggtccttctcgagacgaacgggttcgggttggtccgagagaacgtggaagagctagtcgccgcgggtttagacgccgtctggctcgatgtgaaggcgtggaaggaagacgtgcatcggaaactgacgggagcgacgaaccgctacaccctcaaagcgatcgagttactcgtcgagcacgacgtggtcctcgaggtatgcacactctacatccccggttacgtggaggccgatcagatcctcaggatcgctaagtacgtggcggacatcgaccggaatattccgttcacgatcctggcgtacttccccgagtacaagctctccgtgagacctccaaaacgctccgaacttgagaccgccgagcgattggcgcgggaggtggccgggctgaagaacgtgaagataggcaacgaaggtgtggcactaccgggttaaccgggaaacacgctacaagaaggaataaacgcaatccgttcccccgccgaatgtgggggtgttcgaagggattgtccgagtccgaaatccggtgtccgtgtatctgcaacgggaagtacccggcaccggcgctcaccgtggacggtatagtcccctatcgtgggggtatcgtgctgatacgacgggggaagaagcccttcaagggtaagctggcgctgcccgggggattcgtggagtgcggtgaaactgtggaagaagcggtagctcgtgaggtccgggaggaaacaggactcaaggttcggcctgtcgagttggtgggggtgtactcggaccccgggcgtgatccgcggggtcacgtcgtatcggtgtgcttcaggtgtgaggtagtgggaggcgagttacgagcgggctcggacgcggcggatgtgaaggtcgtagacccttcggacttgactcccgatgacctcgcgttcgaccattacgatatgcttcgggacgcggggatcgtgcgttgaagagggggttgaagatagcagcttacgtagccggtggtctgcttctgtgtacggtgtccgcgaacgcattactcggtatgcgtgagcctccgaggttcgccgagatcgacaacccgagcctcggggatcgagtatttctggcgatttcaggcctggtggtgggcatcatgggggtcagtaggggcatttgggaactgaggaacgtcgaacgggtccgggcggcgctcggtctcctgaagaaggctgaacgctacctcgaagaaggttcggagaggattccggcgaagtacaacgccgtgacctacgcgctgagagccctcagatgtgtgaagaacgccgtcgaaatccttgaggagatggaagaggaactggaaagtcaggagcgagagctgaaggaaaaggcgaaggagaaggaaaaggcggaaaaagagggggaggaagagaaggtcgagaagcggggtagttccgatgtacgaaccgctgaaagaagggacggagccggggacgagaatagtgacgacaggcgtagtcgtggggacggaaccgctgaccgtggacgacgggaagaggatcgtggagtgtccgacggtgggggaagtgagggttctggatgagcgcggtgtggaaatcgaggatccccccgagacaggtgaggtagtacgggtcttcggttcgatcaccgagatcggtgagaccgtcaaggtcgagcctcacgcggtgcagcggttggggatagacccggagttgtggaaggacgtccgggaggcgctggggtaagggtttatctttcacaccctcgcgccagagtgcatcggggtgcttaagttggtggagttcagggcctaccaggaggaggctaggtacttcaagtacgcgttcaacgcggcgggcaaggtggtcgaagaggcccccttgatcgtgacggagaacgggatcgtgtccagggcgatggatgcctcgcatatcgctatggcagtgctggagatgccctgggagatgttcgacgagtacgagcccccgagcgacgagctgatgtacggtctcgacatggaggaggtgacccggatagtgcggcgtgcgcgggttacggacgagatcaccctggagggtgaggacgaggaggaggtgataatcaaactcggatccagcggctacgagcgtgagttcaggctccggagtatcgacatcgatgacatccccgacgagcccgagctggatttcgcggtcgaggttaccgtggtgccggacttcatccaagacgccgtacgggacgcggatctcgtcagtgacacggtcaaggtcggggcgaagggtaacacgttctacttcaaggccgaaggagagcgtggtcgcgtgattccgaaggttcaggaaggtgcggaagcgttactgacgttcgaagtcgaagaggatgtcgagaccgcgtacccgctggactacctgaaggacatgatccaggctgctcaaggcgcggagagtgttaggatcagactaggtcaggacatgcctttggagctgacattcaggatcggtcccgcaggtgaaggtaagttgacgttctacctcgcgccgcgagtggaggagtgaacccttcctccttctcgccagaatcccgcattatccgggacaggaccgtggctgggtgggggactagcccccgtacaagtacctgtcgaggagcgctttcgggtaccctacgtatggtatcctgagaaccaccctaccgctgatctccttgggccggatcgggcaccatggatcgggcaacgggttgttgtctcccttggtgatgacgccctccggcgttttggctatcaccctgtgaaccactgggatcggtttcccaggcagccggtacacgatgacgtctccgactttgatgtcacggtacgggaccccgacgaccaggagcacgtcgccgacgttgtagtacgggtacatactctcggagatcaccgtgaccaccggatcgggcgtgcccagcacgaatccgagcccgtacctgaggccgtaccccagggccactcctaggaccacgtagaagaccgcggctttccagcccctgagttctcttactttcctccaagccctcttgacgttcaacgcggaccaccccatagaccaccggaacgggtcgagaaatagccaccggaccgtgtgaaacccctacgtactgctccatcgctgaaactttgccatctcaaacctatttcataaccgattttaatcgaagataagcttaatatctcacccgaagcttaccgaagtgcggggggtgataacgtggtcgaggaagacgtcgtcgagataacctcccgctatctccgcagggatcccgataaaatcgctgagatctacaaagccataggtatcgagacactctcggacctcgctgcgaccgaccctgctacaatttcggacgctttcggtgtgaaggagagcacagccaagaagataatcgcggacgcccgcgaggaagccagtaagggtatcatggaggccaagacccttgcggacctcctagaggaagagaagaagcgtgacgtaatccccacgggtatacagggtttcgacgagcggatgggcggtggactaccgaccggcgttatcgtcggtatgtacggaccgccaggtgccggtaagtcacagttcgccacccaggtggccgcgcacgcccttaaggagggtgagtcggtgctctacatcgacaccgagaacgccttccgaccgcagcgtctcctagagatcggtgggttcaagaaggacgaactgaaagaagtttccgacaggttcgtgctgcggcgtatcatcgacgccgcggcgctgagacagtacttcgacgagaaggagggcgagttcatcagcgaagcctacgaactgacaccgaaggtcgtggtcatcgattccatatcacagccgttccgtccgtacagcgcccgcgataagctaccggagcgatcgcgtatgattgcccacatcttgaacacactgctcaagtactgcaccgcttacaacgccctcggcatggtcaccactcacgtccaggcgaacccggacgcttggggtaagcgctggcaagacgtggctccaacggtgctcaagcacatcgccacgtaccggttcagcatcgactacaagggtaggactgagcgggtgatcacgctcgaagacgctcccgacaagccaccgttcgaggtccaagtggaactcacggaccgcggtttagtgggctaactgcgcaactgtgcgatccccggatgaggatacagccgggaccccgaggaccgatgcggagtgtggccgtagctgacgggccttcacctccgcacacggaccatgagtccgtcgcgcgccacgacgactactggaaacacctcccgagcctcctccctcattctttccggatccactttcgtggacaggtgcgtcagtacaaggagatcgacgcctgcctcgcgggcgacctcggcagcctctaagtgggtcgagtgcaggtatctcacggcttcctcatgatcctcaaagcacgcttcatgtaccaatacctggcaaccgcggacgttctcaggatcggccggacgaccgtctcctttcacatacacggatatcttaccgggtttcgtcaacgagtacgggcgctcaccgcgtaagagcacttcacgccgcttcgatggagggacccttcgtatgtacttcggatccgcctttcccggtattttcggtgtctcgatccgatagtcgaccgtaggaaccccgtgttctgactcgtacaccagcaccctgaggtcaccgatttctacttcgtctcccggattcacctcccggtactcgatcacctcgaggtcggagatgtccaaagcggactcagaacccgccgtgggaccgtagactttcaacctacgcccgtggaggaggtccacggtggtcgcgagtggtaggaggcccgcgacgtgatcgacgtggtggtgggtgagcagcacagcgtccacatcgtggatcgtgacaccttgctccatggcccgccgctgggtaccctctccgcagtcgattagaagcttggttccggagaactccaccagcagtcccgggtggctccgatccttcgacgggaccgcgccacccgttcccaggaagcgcatcaccagctcacggtccacgatccgtcccccggacctcggaaaccgccagctcgaggcggtcgataccctcctccaggaacgagagcagttcatcgatcgtctcgaagttcaccctacagggtctcgccatcgctttcacgatccgctcgacgtcttccctcgaaacgcctcgcccctcgtgtgcgaagagatggcgtgccttccgtagctccgagcacgagagtacctggatgtacctcgacaagggtccgaacacgtccttttcgaccgcacccacttccaacgccccagacaggaccttctgggctacgtggaggaacgcgaggactgctctcccttctccttcctctcctctcagttccctcagtaccgcctcgatatccgagtcgagcctatcctctaccgccccactcagctcctcgctcgaaccaagtaggtcggcgagtaggctggcgagctctacgggatcggacgtggtgacgcgctctccagacaacctctcgtacagcagcataaagcaagcctgggtgtagttctcgtaaagcatgctcaatctcacgatgaaatccccgaactccccgcggatccattggtaccgggcgttctccagtaccaccctcatgtggtggattatccttcgtatcgggtccttctcggcttccctcagcttcctgagtcttctccgggcttcgtgtctcagttcatccagatgagctgaccgtgtaacctcggcgtagagccgccgggcctcctcgtagttgaagttgagctccgagtcccgggccctgagatacaccggctccatcctgtcttcgtaggcggagaaccgttcggctattccggccgccacctcgaacaaaccgtgctctatcagcacacacttcatggttttcatcgggagaatcagaggagacggctccacctccacgttctcgtcgagcaccctgagggggtgaaacctgtcctcccataacgtcgccccgatcaaacgtatcgcccaacccacgttcgggtgcgcgccgcccacgtaggcgtatagttccgatcgtttcagatcctccctgcggtgtagggtcttcaggacgtcctcgatctcccgaaacacctcgaaccggtccgggtctttcctcaggaccacggggtcttcgacacgaacgccccactctttctccgcgtacaaggagacgagccgagcacagtactcggtgtcctcggggtgatggccgtactggtggtccagacggcgggttcccagcgatatgagtgtgatctcccgcggatcgtacccctcctcgtagagtacgaaccttataatcgcgtccagcgtcgggaacgaggcctcacctaaggcactcgggtccgacagcgcccgctcgtacagacgccgggacgcctcgaagaggtttccaccgccgacgatcacgtcccgaggtcccgctggaaatagcactacggcctccacgtaatgtcccccgaaggcaacatgagttgtccgtcgttcggcggtattgaagcgttgccgtaccgactcggccggggtcgacggccgtgaccgaagggtttgaggcgctaccggacgacgtacagagagtagtgtactcgaggtttgatgaacccactccaccccaacgcgtagcgatacccgagattatggatgggaagaacgtcttggtgatagcccccaccagctccggtaagaccgagaccgcggtattacccgtgttctccatggtacgtgagctcgacgagcctgggatcaaggcgctttacatcaccccgttgcgggcccttaacagggacatactgcgaaggatccgctggtggggggagaagctgggcctcgaggttgcggtgcgtcacggcgacaccccgcagagcgagcggaggcgtcaggcggaggacccgccggacgtactggtcacgactcccgagaccctccaggccatactaccgggtaagcgcatgcgtgagcacctctcccatgtacgtcacgtgatcgtggatgaagttaacgagctcgccctggacaagcgcggtgtacaactgacgctcggactggaacgactcgccgaggtggctggtgacttccaacgtatcggcctctccgccgccgtgggctcgcccgaccgcgtgggtaagttcttggtcggcgatcgcgacgtcgaggtgctggagatcgaggccgagcgttacctggacgtttccgtggctcatccgaccgggccgcacgaggttaaggaacggctggaattgatccacgagctggcgaaggagcgggactctgttctcgtgttcaccaatactagacagatggccgaactactcgcgacccgcctgaaaacggagtacgacgacattgaggtggagatacatcacagttcaatatcgagagagaagcgcatggaggtcgaaaagaggttcaaaaaaggtgagatcgatgtcctcgtgtgcaccagctcactggagctcggtatagacataggccacgtggacttggtggtccagtacggctcgccacgtcaagtaacccgcctcgtgcagcgagtgggacgcgcgggccgtcgacgtaagcgggccgagggtctcgtgataacgtcaaatccagacgatctcgcggaggcggcggtgatatgtcgtcgggcgctgaagggatccctggaacccactgagatcccggaaggttgcctggacgtcctcgcccaccagctcgtggggttgtgtctggacgggcaccaggtcaccgtggactacgcgctggaggtgttcagacgggcttatccgtaccgccatctcgacgccgagacgctccgagaggtggccgagttcctggacgatatcgaggtgctccgggtgcgcggtgaccgtgtgtaccggacgaaggacgcctggaagtactattactcgaacttgagcatgatccccgacgagcgacactaccgggtagttacggagagcggcggacacgtcagcgtcctcgacgagccgttcgtcctcgagtacctaaggccgggtatcaagttcatctgcgccggtaggccgtggatcgtgcaggacgtggatcacgaccgttacgaggtgctagtgacgccggccgaggccgtggaaggcgccataccctcgtgggtcggcgaggagatcccggtcccgtacgaggtggcgcgcgaggtgggggaagggatcgggcgggccgaagcggcgctggaggatgggttcaccgaggccgtcgaggtcgcggccgaaaccttcggtctaggacgccgcgaggccaaggtactagccgacctgatccgtaggcagcgggagcactcagcggtgccgcttccggagaggcccgtcatcgaggacctgggtgggaccctggtgatccacgtgtacggtggtacgaaccccaaccgcaccctggagaaagtcctcgggaccttgatctcgggacgtctggggacgacggtcaggacgtactcgaccccgtacaagatcgtgatctcggcggagaagcgggcgggactcgacgcggacctcctcatggagtgtttggagacgctgccttccgacgaacgcgggttccacgccctcacgctcagaatcgtcgagaaatccgaggtcttcaagcgccgattggtgcacgtcctgaagcgcttcggtgcgatagagccggacgccgactacagggacgtctcaccgcgacgcctcctgaaggcgttcaaggggactcccccgtactacgagacagtctcggaggtcgagcgggatctagacacctccgtggcgttccgactggtgaaggagctggaggagaaggcggagatcgtccgggtgcgcgatccttccccgttcgccgaacacgtgttggagggactcggagaggtagggcgcgtgacttcgggactcctggccgcgcaggtcgagacgctcaagcgggacctggaacgacgcaagctgtggctcggctgcccgaactgcggctggcgcggtcgacgctccgtcaagaccgttaaggaggagggtctcgaatgtcccgactgcggcgctacgtacctggtcgctgccaagaccgaggagggtctggaaaagctgctgaaggactccgagcgcgctcggcgggtggccgatctgctcgagtcatacggtgccaaggccctggaggccctcgcggtaccgggtgtcgggcccgaggccgcggctaaggtgctccgatcgaccggcggacgtgagccgcacttctaccgtgagctactgcaggagcgcctccgttacctccgcacccgtcggttctgggactagaccggtaggtaagagagcccgaggaacgtcagcagaaggaagaacaatcccgcgatcccgacggtcccgatgaaaggtatcggtatccctagggggggtgatggaccctccccgctctccacaccgttcagtggtctccgcgtctcgacgtctcccgtcaccggtgcgtcgcagcggatccgggtcacaccgccgaggtccaggaacggtttggaaaccgcgacggcgacggggtacccctccagagcggccttccacaactcttccgtgaacgccgccagggagtcaccgggtaggtctgtcaacaggacgaccgtgagggtacgaccgcgcttagaggacacgataaccgtcagcggggagatagcgccggagagtaccgagtacaacctgttcacgacctccacgggcccgaagaactccaggataccggggtgaaggttggaaaggaagagatcgtaagggaccagcaaaagctcccccacgtcgctcgtggactcgtcgtccacgacgaagtagcgacgagatccctcttggacggccccgaggacgagtaccgcgtggtacaccgagggacggttcaacaacgagaccacggctacctcgaacactttcgaggccgcatccgagcccgcgatcgcctggaaggcgtcgatgatgtcgaggttatcgtcgtcgtgttcccccgtagccgaaatctcgtactgaagtggggtcacgggatcgccgttccaccatcccatggcgacacccaagttgtacatgtccaccgcgcacgcctccgcgcaccagatcctgtcaacgcgcccatctccgtcgatatcggacccgaaagaggtgttcggagcgtcgaactccgggtctaagtagtaatgaccggagacgaaccctcccactcgaccgtgagcgggcgtcatcgcgatggataccgcgattatcagcacgagggcgggcaacattcgggttcacctctcgggctcgaagagcgccaggtaggacgttctcatccccgagaacagcgtcccccgccggaggaccttcccttctccccacaccatgcataggcaggatcgtctccagccgtcgagcgccttgaccgccgtggcgaaggtctcgggtgtgacggcgtttagcagtatcgcgcgtcgcacgcgctcggcgagggcgaggagtacctcttccagccgctcggaaccggacacgacggcggcgtccacctcgtccacgtcctccagggcctcgggggcccacccgcgcactatctctatgcgatcctccaggcagaagtcccggacgttccgctccaacgatcggaacgcttccttgtctccttccaccgcgtacacgcggccgagaggccctaccgcccgggccagctctagggttagcgagcccgatcccgcaccgatctcgaggatcctctcgcccggtcgcggtcgaagtacggccagcaccgtcgctttcatcaccggcttggtggggcctggaacaccctctgtgaccaagtcggaggggtctacgacattgaacacgggagcacccaccctgtacggagtgggcctgggccccggggatcccgacctgctaactcgtaaggcgatcaggattataaagaaggtacccgtcgcgatggtacccttcgtgggcgcggagagtcgagccgccagggtagtgcgcgccgtcgacccggaggccaccgtggtcggttaccacgcaccgatgaccagggacccggaggaacgcgatcgggcgtactcgaaggccgcggaaaccttggcggaactgctcgagcggtttcacgaagtggcggtctgcaacctcggagatcccaccctctacgccacgttctggcacatcgtggagcggatcccactagaggacttcgagatagagctggtccccggaatcccggcgggactcctctgtgcggctcgcatcggccgccccttagcgatggagagtgacaaggtcctaatctgcactcgggaaccgccagaagacctcgaaggcatggatacggtgatactctataaaccaacccggcgaggcgtcgaaaggcttctcagggaggggttcgaggtctacgcgtgtcgggagctggggttcgagggagagcgagtggagcgcgtaaacggggccgagttcgagcccagttacctgtgcacgatagtcgccctccggccctgagataccagggcgggggccgggtttttacccggtgactacccgggaggttcgggggcgagggttgctccgtacagtgtgggtagattacgccaggaaaggcgaacccgatgtcatcttagtcggtcggcgggaggacgggaacccagctgccctcgtcgttaaggggtttcgtccctacttctacgcggaggtggaggacgggttcgatccgtccgaggtggagcgtctgagcggtgtggtggaggtcgaagaagtcctgttggagcacccctacggcggcgaccgggtggagctcctacggatcgtcgccacgtaccccaaggtcgtccccaaactgcgcgagcaggtcaagaagctggacggcgtgaaggaggtctacgaggcggacatccccttcgtgcgccgtgccgccgtcgacctcaacttgccgccggcgtccgaggtcgacgtctccgacctggacacggggtcctggtccggacttcccgcgtacttcgcggacgtcgaggacgcccgtgagttggaccaccgcccctacccgatcgaggacctcgtcgtcgccagcttcgacctcgaggtgctggcggaacccggaacgacgatcaagggagcctcgggccccatcatcgccatcagcttcgcgtacagtacgcctgacggggagcgccgtaactacgtgattacctggaaaggagaggacgagtcgttcgaagtggacggggtggaaaccgaggtcatcgtgtgtaggtcggaagccgccgcgctgcggaggttcttcgacgagttccgccgcgttgatcccgacgtggtgttcacatacaacggggacgagttcgacctgccgtacctgcaacaccgggccgggaagctgggtatcgacgtctcgcccctggcgcggccggcgggcaagcgtgggatcatactgaagcacgggggcggccgttatgcctccgatattttcggacgggcccacgtcgacctgtaccacacggcgaggaagaacctcaagctggaacgcttcacgctcgaggaggccgtcaaggacgtgctcggtgtagagaaggaggagatggagctagccgacatcaacgaggcctggaagcgcggtaatctggacgaactgatgaggtactcggctgaggatgcccactacaccttagagttggggctcgagctggcgcaggtcgagttggagctctcctacctgacacggctgccgctgccggatgcgacccgcttcagcttcggacagctcgcggagtggagggccatctacaaggcgcgccaggaggacatcctggtaccgaacaaaccgactcgagatgagtacaagcggcggcgtcgcaaggcgtacaagggcgcgatagtgttcgagcccgagatagggctccacgagaacgtggtctgcgtggacttcgccagcctgtaccccaacgtgatggtcgcgcacaatatctcgcccgacacgttcgactgcgactgttgtccgcgtgtgaccgtcgaggaggtggacgaccccacggacgcgaccgtggcaccggacgtgggccacaagttctgcaagcggcgtaaggggttcttcccccggctcgtagagggactcatcgaacgccggcgtgagctcaagcgccgcctccggaagctcgataccgagtcgcatcctcacgaggctaagatcctcgacgtacgacagcaggcgtacaaggtcctggccaacagctactacggttacatgggctgggctaacgcgcgctggttctgccgcgagtgtgccgagagtgttaccgcttggggtcgctactacatcagcgaggttcgaaggatcgcggaggagaagtacgggttgaaggtcgtgtacggggacaccgactcgctgttcgtgaagctgcccgacgcggacttggaggaaaccatcgagcgggtgaaggagttcctgaaagaggtcaacggccgcctccccgtggaactagagctggaggacgcctacaagaggatcctgttcgtgaccaagaagaagtacgccgggtacaccgaggacgggaagatcgttacgaaaggtctggaggtggtccgacgggattgggcgcctatcgccagggagacgcagcgtcgagtcttgaagcggatcctagccgacaacgacccggaggcggcgctgaaggagatccatgaggtcctcgagaggctgaagtcgggcgacgtcgacatcgacgagctcgcggtcacgtcccagctcacgaagaagccctcggagtacgttcagaagggtccccacgtcagggccgcgctacggctcgctcgacacctcggagtggagcccgaaccgggtaccatcgtgaggtacgtcatcgtccgcggtcccggtagcgtcagcgacaaggcgtacccggtggaactggtgcgggaagaggggaaagagcccgacgtcgattactacatcgagcaccagatactaccggccgtggagcggatcatgcgggcgataggttattcccgcgggcagatcgtcggtgagacggcctcacagaagacgctggatcagttcttcggctgacgggatgacgagagcacccctaagtgatcggtgatcggcttcaccctggccgaccgtgggtgttctccttgcgagtggccatcctggacgggtacacggatgagccggcgggtctaggtgtaccaccctacctcgggacccacccccggtacgcctacggcgcggcccgggccgcgggagccactgaggtgcggtacgtgcccgtcgagcgggtgaggtcgggcgacgtcgacctgaaccgcttcgacgtcgtggtgggcatctgcggggtgcacacgccggggaagtacctcggcgcccggccggcggacctctccgagatgctccgtatcctcagtgaggtcgacgccgtcacggtcctaggtgggccggcggctcagtccggacacggtcgggtcggcggtgagctacccgagaccgaagtcgagggtgtggacgtgatcgcccggggcgacgtcgaggccgtggtgtacgacctcgtttccgagggctcgcccgaagccgtcgaccccgaccggaggcgatcgatcgaggagctccgggagtactccgtgaagggagcacccgcggcccgcgagcacgtggactaccccgatgccgtgatcgcggagttggagacctaccgaggttgcccccgtttcctgtccggtgggtgctcgttctgcaccgaggtccctaggtacggcgagcccggagttcagaccgccggaggacgtcgttgaggaggtgaaagcgctgtacaaggtaggtgtccgcaggttccgggtcggacgacaaccttgcgtgttctcctacatggccgaggggatcggggagaccgagcgaccccggccgaaccccgaggcggtggagaagctcttccgggggatctgcacggtcgcccccgacctcgtgacgctccacgtggacaacgcgaacccggcggtgatcgcggagcatcccgtcgaatcccgggagatcgcgaaggtgttggtccgttacggcacccccggcaacgtcgtggccttcggcgtcgagaccttcgacgagcgggtggcgaggaagaacaacctgaacgtggagtccaaggaggaggtcttccgggccatcgaggtggtggcctccgtaggcgggtaccgcggctggaacgggatgccgtatctcctgccggggctcaacttcgtgtgcggtctcatcggtgagaacagggagcgttaccgtcgcgacgaggaggtccttcgggagctggtggaacgtggtcttcgggtgcgccggatcaacgtcaggaacgtcgtacccttcccgggcacagagatgggggaacacggtacgaagtggctcgaacgcaacagggaacgggtggccgcgttcaagcgcttcgtccgggaagaggtggatcccgtcctgctccgccgggtgctaccgaagggcaccgtcctgaggcgcctccgggtggaacccagagaaccggagttcgcgcggcaggtgggctcttaccccgtggcctgcagactactcgccgagcgggaacccggtgagtgggtcgacggcctggtggtaggtcacggggctcgttccgtcgaggtgatcccgctgccggtacggcgggaggacggtccggacgtcctcgccaagctacccggggtcggtaagaaggaggctctggatgccttcctcaagggccgaaggccgcgggtcccctatgccctgcggtcctggttcgcgttctgaatcaccagttccacctacggaactgccgccgcgcccaaaggaccacgatcatcgacgcggccagtaaccccactacccactcccagataaccctaggcgcgggagcactctcccggaccattgccctcgcctcggactccttcgcggcctccgacttcaaggggacggctcgacagccggatcccgaagtacctcccgtcgagatcgctcctccgaccggtaggcgaccgtggaagatcaccccggtcgtagacaccagctccgacgccctcgacaccgaccccgaggggaggttacccacctcgaggttgttcgctcgaggcgattctacgaattctaccgcccgtaaggatcgaggggaaacggatcgtggttctaccgcgcggtaggatgccctgcttctggtgacgatcatcctgatcatttccgcgactaccttggggttgtccagcgtacggtacgcccgaacgatatcggggagcatcttcaggacgtcgttgagacccagggacgccgccaggttccggacgaacggcaccgtggacgggttcaggctcgtgtggtggcacgtggagggaccgtaccgtgccgtgacttccgcccaggccctgactagggccttgagggtgttccggtccggcttccacagacccacacgcaccgcctccacgagccacgagagcgtcgactgtacctcggcccaacccttcggggtcgacggtcggtagcgttcgagcgccgacagtatcgtcgacgccacctcggtcagcaacgtctgaaccatcggtctgacctgggtcgtcgtcaccgcgatgccgacgatgttctgcacgcgcttcatcacctcgtgccatcccacgtccggtccgtgggccatcagtgcctcccaccagctcgggctcagcagttccgtccgcacctcgatcgccagccgctccgccagggtttgtacgtgcgcggtggtcggatcgcgggccaccgtcaggaacactagtggctccttcttcctgatcaaccgcacgtacgtcaccatcccgccgatccaggagtagtagtcgttcacgtcgatcacgttgaacgcgttcaccacctgatctatcaccgcgtccacggtgctcgcgaggtaccggaagaccttcacggccttaactgcggcctcgtacccagtcagctcctctcgaagcagcttggagccgttcgggttacccgtgacggtgaaggcgtacgccaccctggactcgaagatttccgcgatcttctccgagaaccgcgcgtcgacggtccccgcgccgtcgatccccaggcccttcgtgagctcggaccagcccagctccaccagacggttgacaccggttccctggatatcgcccggtggctccccgaacaccccggtggccgccagcggctccggtaccccgagctttaggagctcgagatagtgcttcctacggtggttgtacgcgaggggctcctccgcgtcggaggcgagccggaaggcggcggccagcagttggaccaccggctcgatggagtccaggacggccgtgcagagcgctaccacgtcgatcctcggtcggttgatccaccggttaccgaccttcaccttcagctcgtccagcgggatcagctccactcccagaactttgccgctgttcgggtcccagacgggcttgacgcctaggaggtacaagacctgtgctattcctaacccgccggacgtcagctcgtgtgatgcgaagagcacgatgggaacggtctcgggccacctaccgtatacgcggtagtatcgggccaggaagtcgtccatgagacgcttagcgacctcccaggcttctggagtgggaagggtatacgggtcgaacggtacgccgttccgtccggtgggataggccttggggttccacaggggctccccgaaccctccggtcgggacgtgcccgcccctcaggaagttgacgagattgtccagctcgtactcaccggattcgtacacgtgaacgaactctctaaaggcctcggctataagcttaataatgtcctgatcgtactgattcgtgacctcccatagacctatttttaacaacgactgtcggtacaatcctaacaaattgagcttaaatcgttgcagtatggtgtccgcttttgagagcagtgacgcgtcgtctcgtagctcaccttcgtccttgagctcgacccactggagtaaaaccgaccgcaggtaggggtcgttccagatttcgtggagcatcgagcggagcagctcgtacgtccggatcttgacatcctggtagaagtcggggttctcgtccgctaacctgcggaacagctccaggtcggccttgggggttaaccccgtcgtgaccgccaagtagggggcgaaccgcggtgcgaagagcaacgccgcctcctctacagcgagctcgaccgggaggtcctcaccgatgacgtgcagaccgtagaacgatttctcgtctcggagcgccagcaggtaatcgtgcagggcgtcgaggaactcctccaggtgtcgctcggcccaggactcgggatcctccggagggctctccccacgctcggcgaagatggacttcacgacgtcctcgaggatccccagctccctcgccttcttcaggatcttctccgcgataaccttccgtacggccggatcgccgccgtatatcgaggagctcacgtactgcgaccacaaccgctccagctccgcgtatttgcgaaagtccttgaaatacccggatggaggggacggatacgtcaggatcacggccccgccccggtacttcgccagcgtcccttcacccgggttgctcacaatgtagaagtacgcctgggggacgtccgggagcagcaagtgcgtccagtccgtgaccgtgagtccgcggtcgtggcccggtaggaactcgaaggtgccgtgcgtgcccacgtaaaccaccgcgtccgcgtggaagaccctgcgcaaccactcgtacgcggcgatgtactgccaatgcgggggcaactccctggagtggtagacggcttccgggctccccgaccaaccacgcaccggctgcaggaccaccgccacgttgccgaacctgagggcggggacgaggtaccggcgaccgtccgtcatgatccctcggttgtcggtcacgtccccccaggtcctccggaaaccctcgatcataccctccacggcggctctgaccgcctcgggatccagctcacggacgaggtcgaggtacgcgtgcagccgcctcacgacgtcctcctcgaaccattcccggacgttttcggccggaatcagttggtcccgggagatcgagcatagcacgaaggagcgaccgtcgacgctgaccgtgaccttcccatcgcgcacctcgatctcgacctcgcgtccgtcgacgttcagcgaccactcgccgtacccgccctcgtacaggtcgaacatccgtcgaagttcgcccttcgcccatggtccgacgttcgcgagcaggagcaccgaccgacgcgggtcgtgggggtctaccgcggaggacatcgcgttgaacacggcgacgaacacgtcctcgagcgttcgagcctcccgtggatcctctcggtacgcgcggtagagctcccggaagaactccgtcccggggcccaggtcgaacccctcaccggccagcctggccaggatccgcgcgaggctcctggggacgtccaggtacgccgctcccagctccgcgcgtcccggcgggtagcagtacacgacgagcgcgaccctcttctcccggtccggcaacagcctgagtcggagtatgtggtcgaccagtctcccgagatcgtccagtgtcccgggtagcagcacgggctcgtcgtccttcccgttcaaccacagcacccggtaccagaaggatccttcccgttcggagcccaactgtacctgataggtccattcgagtgagggccctgctcgattcgtcgcgtactctcccaggcccatgctggcgtctccggtgaaggggaacaccacctggatgaccggcgtgtttagcctgatgacgacgtactcggccggtttcgggaagttcagcgtgaacgcccggacgctgattaaggcctccacgcgcttgtgctgcctttccagcccggaaagtacttctacgggcttcacgaacgacgattcgcagaagaccgcgacggtccgaacgccgtatctgcttgtgacgtcgtctagcgcctccgtgagtcgcagtacggcgtccctgcgcggtcctacggcgtcgatcccgtgggcgagtaccaggacgaggtcattgggaagcctggacgcgaacgcgctcaggtccattccacgcaggacgtcgacagcccagctcggtagcttctggcggaacccgaagagtaccacggtcccttcggtctctccgcgggccaagcgtcggagccaatctcggaaggaggcggtgtcgaagtgtgggattcccccgatccatccggtccccgggatgtaggccgagagagccgttctaacgatcgttctaggaggttccacggcatccgtcgggaaggaggggtcggccagccatagtaggaacgtcacgagagcgcgcgtgtcccccgccgtcagacacagccagatatgcgccgcgacggccaccttggccttcacgggccgaccgcggataaccaccagcgcgcgctccggatccgatgtggccaccacgaccacgcgcttcgtcgaggcgagggcttcggccaatgcgtcaattatcgtccaaggcagtcccgagggtcctccgggacagttctcgggtgaaagccgttgggaccgtccccatacgctggatcaccaacacgtcggcggatcggacgtccctcgagataccgtcccagtccaagttccctatgctcgtgggatccttcgggatccgatgaacgtgtacggggatccctaactcccggcctacctcttcggcgttcggcagcggtgtggtgctcaacacggtgatctcgacggcggaggcggaatcggaacttaaaatttggattaacacaaccattgtaagaagtaacacaactgacgtacgtcgtaagtgttttaacatcttcttgagtgccccgcgccggccacgcgacgtgtcgaaataacagtttcggtgggggtgagtcggtctgcgcgcgatacctgtggcggccctgatcgtcgcccttaccgacgtccgcgtgggcggctgactgggggagatcatcgacaagtcagtgaggttttacttcgcagtcgataaggccagggagcgtggtgtgcctatcaaggagttcaagctgattcaggaggacggttcagtgtactgggaaggcaagttcgggagatctaagtgggagacatcgggtgaggtaatttacggcaatatggtagctctatccgggatatatctagggttactcagcggcgaggtgaaaccgaagacatggcccgaaccagaacgatcccgattcgagaaaggcattaccgtcggactcgctcggatcctgtcactccagcaggaagatggtggctggggatggaaagtagtcctagtggaaggcaagaccaggtttccagccggcaagggccatgtcctgtacacggcgaagatactcgctaaagtgttgatcccggcgctgcggttgaacattaagaacgtgagctacggcgggaccacctacgacgtcgccgaacacgcgcgtgcggcggtgaggtttctcatcgaccagcagttggagagcggtggatacagcgccaacaaggagtggtcgatgaccgaggacccgctctacacggcgtgggccctacgtgcgctgtgcgaggcgtaccggtacagggacctactggggctcgacgacgcgaccgtccagcaggtcaaagaggcgatccgtagggcggtcgactggttactctcgcaccaggaggacgaaggtgactacgccgggctatgggagatgaagtccgcagcgatcatgggatccgcgtacgccccaccgtcggaggctcaaatcgtacgtgcacttatccaggcatactcgatctcggaggaattagggttgaacaaggccgagctcaaggaggcatagatcgggcgctggaggcgatcgtggactgggcgctgaagtaccaggatgcctcgctggtggagttcgacggtcggaaggtgctcggctgggcctactcgtcgacacgcctggagagttgcggtccgtacctcgggtacaccgccctcatagccgccacgctgaagctggcgcaggagctgggcctagggtcgaaagccgtcgagaagatgaggtccgtcggagtgaccttagaggatgaggcggagtgggtggctcacgagtggcaagagatcgacggactcgggtacttcctgtacccgaactccaaggccgagcacaaaacggtgacaccgtcgagccagctctacggactgacctgtgcggtggcgttctcgcacccagaggtgctgttgaagcgcactacggcggacgtttggaagctggtgcctaagaagggagcgtggaaagttccagtgtggccggtggtcacggtggtgctgctattcgcgtgccgacgccgctaacccgttttctgtcctcacggatactctttcgtatccgttcttctctgaggtggcgggtgaaagtactcacaactaattcacgacttcttccaaccagtgtagaaatttcgttgacaaaaactcggttccactttaatttaaagccgccggccatgtggggcggctgtagggggtgagaccgtgaggttcccggcgctggtcatcgggctactcgttgcactgggtccgaccgcagccagtgaaagtcccaaggttgccgtagtgatgccgtaccacggcagttacgatccgcactggatctacatggcccacgaactccctgagaaagtccaagagatactgagcgtaacctatgacgaatacaatattcaagtgtatccaggcagtttcgaaacctacgacgtgaccaaggtgcgacttcagggcggtaaggagtacgtcatccatcaggaagaggtgaacacgggcgaggaagtcctaaagaccgaactcgggcacgccctcaaggaggccgaagagttcacgaactccggtagggacggtctgatcgtcgtgctaccggccttcgtgaaccgaggaggtcagcaccagtgcgtggagatcccggaagttatcgacatcatcttgggcgataaggtgcccaagtactcggtccactacgagccgttcggtattacaaactgggaccgccagaacgacatcggtatcgtaccggagctgctcttcaggaacatacagacggaggctgagaagacactgacaggaccgaacggtcaaggtgatcccgaagacgtgttctcggcgtacaaggataagagactcctggacttcctggtggaccacaaggacgaggtcggtctcctcgagatcatgttcggcaccctgcgggtgggttactgggacgacttcaaggcgaacgctatgtacgtactacgtggtgtcgccgagagactcggtaacctcctggggacgacgatcccggtcggtgaggtcgactgggcgctggagaacccgttcgtgagggagggtaaggcgtacttcttcgcgttccagaacccggagatcggtccagagaactgggagaagtcacgctgggaggtccgatacgagcagttccagaagctgatgcagagtctctgcaggcagggcgtcaggtacgtggtcgcattcccgtacatcacggtgaccggtatcacggaccgcaagctgttcgaaggcaacccggagcacggtcccgaaggtgacgagcccgaggcttacgactatccggaagccattctgcggcatttcggtgcggagttagtggcggagaccgtagccgacgtcaggaagtacacgtacgtgcaggagggtcaggagaaaacccggacggtgtacatcaacgctcggatctaccggatcccgaaggagaaactgggcacggacgccgacatgtacgtgatctacgtgagacgcgggctgttggacgctccgaacgcgacggagaaggtggcgcgggtgtacgccaactacatcgccactcacctgccgacgtggttgatggagtacgaggcggtgaaggggatgaaggaggggttcgagggcgagattaactcgctgaggaaggatgtcaagagcctcaagaagaggaaggtcgcggtgtatccggcggtaatcgcgctggcgctggcgatgatcccgccgctccggcgccgctaacgccccccacttcgacaaacgttacgaatgtattaacgatcgaccgtgggggcgttaaggggcttccgcgagctcgtaggggtcgtgattcacccggacctcgcgtcccggacccgtcagctccacctcgggcgcgtaccccagggactccaggtcctcgtacagggccagatgtcccgagagatcacagtactcggccctcaacgcaccggcgaggtgtgcggccgcctttacggagacggcgctctccacctccgtcagcacgatgatcttgaatccgagctccctggccttgcgtccgagcagtaccgcgtctaggaaaccgacctcttgaacgcttaaagccactccctcggctgaacccagcccgtggatgtcctcctccgacgtcacacggacgtagatggggacctccgcgtcgaactcctccggtgagatcacgactatctccgcgtcggacacggaccgtacctcctcgagggcccgctcagagggtcggtccgtgaactctagaagtacggtctcgaagtccagggcggacaccgaggacaaccccgccgagtcggcgcgtacacggaccaccgtgtacccgacggagaggttgtcacgcgcctcccggagtgccccgtgctttccgagttcgtggacggagcacgcggactcgacggttctcggctctccccccagcagttccgcgagtgggaggccctgagaccgggcctcggcatccatcacggccatctcgtgggctacggccggatcgaaccccgaaaccggtcccgtagtggccctccgatgagtaaacccggcacacgtagccgtcgacgcgaccggcggcaccgtttaaggtaacccggcgggtctcgacgggtctcaaggcggatcccgccccgccgggagggtgaacgtgttgaagcgggttatagttgtcggagccggcagtgcgggacggtcggtggcgcggctgctgaaccacgtggggtacgacgtcgtgatcaacgacatccgcgattgggaggacttcaccacggaggagcgcgagtatctggaggttctcgagcgcgagggcgtcgaggtggccctcgggggacacgatcgggagctcttcgagtcggccgacgcggccttcgtgtccccggcgatccccgaggacgccgagggtaggaagctcgcggagctggtccccgaggagatcaccgtcgaggacgttgccgggctgttgggagacctgttccccgtacccgccatcgggatcacaggaacgaacgggaagaccaccacgacctgggcggtggcgcatctcctggaggcctgcgggtacgaggtctggcggtgctcgtccctcgacaggcacctcgtcatcgaggcgatagtggacggcgtggtgacgggtgagatcgagggctacgacgtggccgtcgtggagctcccacacgggacgatcagactggcggccggtatcgagctggacgtcggggtgctgacgaacgtctcaccggagcacttggacgagttcggcggttccttcgagcggtacgttcgtcggaaactcacgataactgaaatgagtgaagtgctggtggccggctacgactgcgaggagctgcggaagcgcctgaacgacgcggtctggtactccgtgcgggatcccgacgccgactactacggacgtagggagaacggacgtctcgtggtgaagggacccgacgcctcggtggaagccgacttccacctgatcggttactacgtagagaactgcacgggagccgtcgccgcctgtctagagttcggcgccgatcccgagggggtcgccgagggtctcgccacgttcgagggcgttcccgggcgcatggagctgctgggggagttctcgggtcgtgtagcctacatcgacgcggcacacaatccggacggtctgaaggcgtcgcttccaccgttccgggagctcgcggacgaacggggcggaagactgctcgtcagcgtggacaatcccgacaccgtgaccgagcgcgacaagttcgagttcgggcggatagtaggggagtacgccgatttcgtggcggccagcgggtacaacgagaccctggagcggctcgaccggtcggccgccgaggaggtagtgaagggcgccgagtcggcgggttgcgagggggtggccgtagactcggtccgggaggctgccgaggaggtggccgcacggtccgaggagggagacgtgttgctccacgtggggccgggggtggtgaacgcgtacgatcgggtcaagcgcgccttcctgcgcggtctgacctcggtgctgggggaaccttcggatgaagcatgagatcgtccggcaggctctcatctacgcctgcgaggagatgggggccctgctccgccgtagcgccttctccccgaacatccgcgagcgggaggatttctcctgcgcgatctacgacgcggacggtgagctgatagcccaggcggagcacattccggtgcatctcggatcgatgaggtgggccgtacaggccgtcctcgatgagttcgggtcctccgagatggaaccgggagacgccttcctgctcaacgacccgtacgccggaggtacccatctccccgatctcaccgtcgtcgctcccgcgttccacgacgatgagctcgtggcgttcgccgcagttcgtgcgcaccacgccgacgtaggtgggaaggtcccagggagcatgcctcacgacgccgaggacgtgtactcggaggggctccggattcccccgatcaaggtcgccgaggacggtgagccccgagacgacgtgctacgcctcctcgaggcgaactcccggggcggtgaggagcggcggtacgacctcaccgctcagatcgccgcggcgttccgaggatgccgccaggtgaggaggatcatcgacgagcacggacgggaagcctgggagagggcctgcgagtggtgtaaggactacgccgagcgtcgcatgcgcgtggccatcgagcggatccccgacggcgagtacagcggggaggattacctggagggcgacgggatctcggaggaccccgtgcgtatctccgtgaccgtgcgcgtggagggggacgaggtgaccgtcgacttcaccgggaccgacgagcagactcggggtcccgtgaacgcgcctctgccggtcacgtactccgcggtcttcttcgccctcaaggcggccctggacccggagacacccgtttcagaggggacgtacaggcctatcgaggtgatcgcgccacgcggaacggtggtcaaccccgagccgccggccccggtatgcgcgggcaacgtggagacttcccaacggatcgtcgatgccatcctggatgcactacgtgaggcgatccctagcctaccggcccactcgcacggctccatgaacaacgtggccatcggcggggtcggattcgcgtactacgagaccgtgggcggtggggccggcgcatccccggactgtgacggggagagcgccgtgcacgtgtacatgaccaacaccgcgaacactccggtcgagcacgtggagcgcgagtatccgatccggatcctcgagcataccgtccggcgtgggagtgggggcgagggtaagtaccgcggcggcgacggtatcatcaagcgatacctcgccctggagcgctgtcgtgtgaccgtgataggcgaccggaccatgcacccgccgcgcggcgtcgacggagggaaaccggggaagacctccgagtacgaagtcgagcgatcgaacgggaaggtagagaggctaggtccgaaggactcgaccgtgctcgaacccggtgacatgttgatcgtgcgcaccgctggcggtggaggttacggaaagggggagtgaacggggaatggagatctcggagtttcagcgtctgatggacgagctgtacggggagaaggatcggaagcgcggtcccgaacggacgttgctatggctcgtggaggaagtcggcgagctggcggaagccgtgcgtaagaacgatcgacaggcggtgcgtgaggagctggcggacgtggtggcgtggacgttctcgctggccaacgtcctcggtatcgacgtggaagaggtgttgaaggagaagtacccgggccggtgtcccaagtgcggtgagataccgtgtcgttgcaacgagtgaaggacggtgtgctgactgccgaggcgggactcgtcggcagggacctggagttactgtccccgataacgatcgagatcgaggacggtagggtacgacggatcgaggagggacgtgaacccggtgcggacgacgacttcgacgtcgttctgcccgcaccgttcaacgcacacgtccacgccgctgactgggcgttccgacacgccggcctcggaatgccgctcgagaaggtcgtcgccccgcccgacggcctgaaacaccggctgctcgagaaggtcggggagcgggagctcgaggtctcgatccgggacttcctcgagacctcgctgagcttcggatgtcctggagtcgccgatttccgggagggtggcgtcgagggtctgaagctgggcctcagggcagccgaaggcttcccgacctacgtcccgatgggccggccgaaggcgctcgacgaccccgagagggtcgaggaggaactccgggtcctgtcggagctgacggagttcgtcgggatccccgacgtacacctgccggacgacgtgttggaggccgtgagggattccggtctccgggtgtacgtgcatgcgaacgagaactggcggtccgtccgcgagtgcgtccgcgaacacggcgccaccgagatcgaacgggcagtggacctgctcgaaccggaggggatcgttcactgcgtggtcctcacggaccgcgaccgtgagctgctggaggagctggatcccgtcgtgatactctgtcccaggtcgaacgactactaccggctcgggaacccggatcccagacgacttcggggtctccgggtgctcctggggaccgacaacggaatgtccgtggagccggatccgtgggcggaggcttaccacgcgtggatccgtacgggcctctcgccgctcggggcgcttcgggcgctgacagtcgaagccgcgtccgtcttcgacctgccgatattggaggaagggcggcgactctcggcggttgggttaaagggcctcccgctcccggaaaccgtgctcgggtccagacagcgtctggccgcccacgtcctccagttgatcaaaacgtcgagggttcacgtgctgttgggggccgagagttgacccggtacgtcgtgctcctcgacggatccgaggcgtctttcgaggcgttggagcacgcgctggaagaggcggacgaggtgataggggtctacttgatcgactgtcgggcattcaaggggctgaacgaagacatggcgagggcgctggaggagttcatgcggcaggaggcggagctgatccgggagaccgtcgagaagcgcggtgcggagttcgagatcgtgcgaggtgagggtcccgaggccgtgatggagtacgcccgggaggtgggcgcggacgccgtggtggtaggcgtgggtcacatccccaggttcgaggatataacgttccgacgggggatcgaggggcacgtgagggacgttcccgtggttctggtgccttcacgttaaatccttacccatgtacgggccgacgcgctcgtacccgagcttccggtagtactcgcgcgtcccgatggcactgatcacgatgatcttgtccgcatccagctcgctggcggcgagctcctccgccttcctcatcagccgctcgccgaggccccgatgttggacggcgtccgtgtcccgctcgccgatcggcaccgtcggtccgacgaccttcagctcgcgcacgatggccgtctcgggatcgatctccggtctgtgggccagctccgtgggcttcctgagcctcagataaccgagtatagcgtccgcctccggatcctcgtacgccaggaagtagtccatgccccccttccacgtacgctctttgatgatcctgagctcggctcgccccggatccacctcaacaccttggcgcatcctgtgacccgcctcccgacagcggatacaccgacactcccagcctttctcctccaggtaatcgtggacgagctggcgtaggttcgtcttccggatgccggcggcggccaagtgggccgggatgtcccgctgaacccgcatgatgcggcagtactccggtacgtagcggtgtttcgcctcggcgatgactttcaccgcggtttcctcgtcgtatggctcgtactcgccacgtttccacgcgtcgtataggggcgtatcctcgaagaccatacacgggtagatcttcagcatatccggcttgaaccgcgggtccttgaacagtcgctttaacatcctgaggtcgcgttcggggttcgagcccgggagaccgggcatgatgtggtaacacactttcagaccggcgtccttgaggatacgtgtcgcctcgacggtatccttcacggtgtgaccgcggtccacgcgcttcagtatgaagtcgtagatcgtctggactcccacttcaaccctggtggcgcccagcttgagcatgtggtccacatgctcctccttgcagtagtcgggccgcgtttcgaaggtgattcccacgggtcggcgttccgaagtttccgcgtacttctgcgcctcctcgatcgtgagcgcgtccttcccggtcatcgcgttcagacactcccgcacgaaccactcctggtaacacaacggtgtcgcggggaacgtaccccccatcacgatcagctcgatcttgtcggtggggtgacccgagatctccagctgccgtatgcgcgcctcgacctgcttccgtgggtggaactcgtgctccttagcccgacggccggccggctccttacccgtgtagctctgtggtacgcccttctcgggaccacccgggcagtacgcacaacggccatgtggacacggatagggcttcgtcatcaccgcgacgacggccacgcccgagatcgatcggacgggtttcttcacgacgatctctcggagtttctcgcgctcctccggggttgcgcgttccaggacgtccgcgtccgtggggaacttcgaaagaccgtatttcctgcagacctcgcgcttggcctcctgtagctcgcctttagttcggatctcacccgacagcatcttctccacgagttcgcggcacgccatgtcgaaggcgtcggcctcggacacatctctcacccccgtacggttctccggtaccgtgggggcgcaacacatttaatcgatcgtcgggagggtacagctggcgccggatggaactggtgaaatccggcgtttgtggggatcgccgcggtagctcagcctggttagagcgccgccttggtaaggcggtggtcccgggttcaaatcccggccgcggctccagttcgattcgttatggattttataacgttcatcggggcggtggagcgcggctccggttaaggttgtgtgggcttccgcgcgctcccccgagacgatggtgcctaccccacccgaccaggaatatcctcgacagcacccgatgcgcccgctgtctatatcgtgatttcgacgatgaccgaagatcggactccatcgggggtcaggggagttgcctaagatccccgtcggcttagggtacaagctggcgtacaagggcgccaaattggggctttggaagtggggaaccacggcgaagacggggttcttctcactgatactccactccctgatcttcggccccctgggtgtggcgatcgtcatcgccacgctcttccacgagttaggtcactacctggcgtgcaaactgctcgacgttcccgcgtccccgccggtgttcctccccctcggaggcgcgttcgttcagcacgggtggacggatccggataaagaggtgttcatcgcggcggcgggacccttcggtggggctctagcaggaatcccgctcctggtaatctatccgaaagcggccgtgtggaacgggctgatacagctgtttaacctgcttcccataccgcctctggacgggagtaaggtactgcgtgggctctggatgcccagtccgaccgcgtggatcggcgtggcgacggcggtactcgccgcagccctctcgctggtcggtatcctcatgggtttgcacgcgtagcgttaatccacctggactaaccgacccattcgaggatacgtcccggtacggttcggatcttcaccgttccctcgatcgcacgtcgacccgacatccagcccggagggaccccctcacgttcgtcacggtgccgtccagaaccccgctcggtatctccacgaggtgttacgaggagggcatttcgagccgcccacgtccacagaggacgtccgcgagcgccatcctggccagaccacgggccaggttctcgacggccagctcgtcacgcaccctggctatctcccgtaaccgttctaccagctccgaggccgtacgcctgggtgagtccgagttccggtaccgcttcgcgtaagggcattcgggttccaccttcgggagacccagtcgggacgtcacctcgtgatacacgcgggctgtgcgaagctcgctcaccacgtacagcggtcgtagtagtagcgcgtcgtcctcctccagtagatccgccggcgggaaggtaccggcgtcccgccttcggttcacgctcatcaggagggtctcgatcgcgtcctcggcagtatgaccgtagaccaccacgtcatgtcgctccgcgaggattctacgcctgatcgccgagcagatcttgcacgggggcttgttcagctcctccgatggctcggccacgtcttcctcggcgcggaccagctcgaactcgtatcccagggccttcgccattcgatcgagctccttccggtaaggccgccagacttccactccgcggactctcacgtccaccgtgacgagcttggggttcacgtcccactcccggaggaacggctcgagcgccagagcacaggtaaagctatccttcccgccgctgaatcctatcgccaagtcacctttcggctcgtcgaacgccttttgaacgatcttcagcagacccgccacgttccggtagatcctcatgtaatcctcaccgtaaaccgagtcgggagcgagagggcgcgcatcccacgatatcgtcagcccttccagctcggtcacctccatcgcctcgcttccccctctcgaaccgcacgaccgccggctccgaaaccgccctccatacggtcgtgggctcacctcgacgggaacctcgccaccgtgcgagcaatggccgtaccgcggtagagccggaccatacacgtcggcgctcgagaggggagcccgacctgatcacactaccaccggtcggaacgaatggatccgacgtctacagggccaccggcgggaagaaaacgatgtgtcgaccgagggccgttggtgggagtgcacctcctcccgcggccgggagtcggtaccgagcggggcctcctcaccgaatcggtcgccaccaccctccccatcatcgtgttccgcggcgctcggcagcggtctcctcgatcatccctccggccggtctcccccgcccgctcctcacagctccgagatcatccgagcgtcgggtggtgatacaccttgtgggaggccgagaggacgctggctttagtataccatgaggagtacctccgacacgaacagcaccccacgcatccggaacgtcgtgagcgtctctcctacacggtggacaggttcgaagaggaggggttgttcgagatcgaggggatcgatctagttgagcccgaccccgtcgaccgcgaggtgatcgaactcgtacatgatcccgaacacgtggagctgatccggcggatgagcgagtcgggcggtggtatgatcgacctggacaccgccgtcgctccggagacctacgatcaggccctgctagcggccggaggctccgttctcgccgtcgagctggtcgtgcggggagagtacgacacggctttcgcgatggttcgaccgccgggccaccatgccggtcgcgccaaggctgccggcttctgctacttcaataacgcggcgatcgccgccgagtatgcgatccgcgagctgggcgtggattccgtcgccatcctggactgggacgcccaccacggtgacgggactcaggagatcttctacgaccgtgacgacgtgctctacgtctcgatacaccaggacgggcgcaccctgtatcccggcacgggcttcccgtacgaggcgggtgaggggccaggtgaagggtacaccgtgaacatccccgtgctcccgcgttccggtgatcggacgtaccgtgaagccttccagcggatcgtggagcctgtggtgcgggaattcgaccccgatctgatcctgatctccgcgggtcaggactgccacttcacggacccaatcacggatctcgcggtcacggctgagggataccggtggatgatgcaacgggcgaccgagctcgcggaggacctgggagcttcgggacccgtcgccgtgctggaggggggttattccgtcgaggacgggctcccgtacaccaacctgggcgtcgtatgtggtatggcgggggttccggccgatctgcgggagcccatggatccacaggaggagaatccgcgggggccggagggggttcgaaaggtggcccgtgagcactcccggtactggacctctgtgaaggcgtgagaccttcgggtgacgtcgagggcttatacctggcggtatgacgtatcgagcggggctcagctgcaaccggtaatgtccggcagttcgtgatctcacgcggtaactcgcgccggtgtcgacacttactccgacgcttcttcgccacgttatcaccccctccgggcgatgaggatcggtagatagggtgatcgggtgatcgggaccgccgttgccgagccgggtcctggaagttaaggtcggagggcgcgtaggtcccttgactctcttcctcgaaaatctgaacggactggatcgatcggagcggaggttcgaatcgccctttcggacgatgacaccggtgagacgcagcacgtcaacggctacttccggacgttatccgtccggtctgagctcgagaccgtccctgccgatcgggacgcccgtcggtggctaccgcggttgacagggctagaggcacatgcggctcacggttcgggggcgggggtatcgctggagggggcgtgggaccgacgtatcggtgagtgggtgcctgggagtcgatggggcttcatcgcccacgactgaacacgcggctgatcaccacgtacagcgccgggaagcccacgagcaccagcgtcagcgtcgaaagcactcctatcccctggtagagtcccatgttcctcatgatacccgtgtgagacagcagcaacgagaggaaaccgatcgccgaggtcagcccgctgaacagtacgccgggtcccgctcgctccatcgtatgggtccaagcctccttgacgccgtgctccttccgctcttcccggtaacgtgaggccaggaacacgcagtagtccattccgataccgagcagtatacatatcgtggtttgcatggccaggaacgacggcactatccgcagcacgccgcccaggagtccaatagcccataggatgcccgagccgatggcgacgagcccgaagaccggcggtatcgggtttcgaaaggcgatcgtcggtatcgccaacacgccgatcgccgacgcgatggtggaccggcgcatgtcctcgttcacctgctcgtgcatctccgcgaacgccaccgggagacccgtgacccccaccttcacgcccgtgggtgggtgttcgtgccggaccatgtccaggatcttccgaccttgcaccttcgggtcccctggtttcagttgtacctggatcacggcgaccttcccgtcccccgagatgactcctttctccatgtcctcgaccttcggctcgagggccgagcggatcggcgccggcagacgttctacggtcttctccatcccgatcacgtcgggggctccgaacacgcgggcggccacgccggtgcgcttcgcgtctcgcttcaacttctccatgaagcggactaccttcggatctcggacgtcccgcgcctccacgacgatcgtggcgaagtgatggctcacgtccatgtgcttctcgagtacgtcccgggccttcagggacggtaggttgtgccccaggaacttctcgatgttgacctctggcttcacgccggccgctccgtacccgagtagacccgtgatggcgagcagcgcgacgatcgccgggaccgggtgcctcacgggtatcgagagtaccttccagctttcctccttcttctcggaactcttccgcccgatcggtatcgactgaagcaggctcggcaggacgagcagcgtcagcgcgacggccgtgaggatgcccgccacgataccgagtccgatctccgagaccatcctgaactccgacagggccagggcggcgaaacccgcggacgccgtgagaccggtgatcagcacggctcgacccgcacgtcggaccgccgtgaggatggcctcgcccttagcgcgtcccttgatgtcgtactcctcctggaagcgtgtcagcgtgaagatcacgtaatctataccgacaccgagcatgagcactacggtcaggaggaccgtcgcgtagaacggggcgaaccccagccagtacatgatccccaagacccatgccacggcggacaggatgatcgtgagtccgaggaccggggcccaccatcgccggaagtcgacgtacagaaccgctgcgacggcggctgatacgagggcggtcactgtgaccagatccttgaggaagccccgatagaagtcgtagttgatggccggggagcccgtgacgtcggcgaacttgacggacttcggtttgtcccgctcgagcgatcgccgaacgtccggcacgaccttacggtaatccgcgtccgacttcagtcccactctgatgatcgcgaccttgtggtccttactgacgaacatctccttcgaccgttccatctccgacatcagaggtcgaagacctggcatagtgacggcggccgggaagttcgccgggctctccctgagaacgtctggagctccccgaacattctcgacgtaaggcttggagcgcaacctgtcctcgatacggcgcatgtaatcgaggaccggtttccgggtgacgtcgtccgcctcgatgacgatcagtagggtcttcgtcgaagtgcccagctcacgctccacgacgtgctgccatttcatggactcgaaccgatccggtaagtacttcgtttgatctacctccacattcaggtggagcgctccgtacgccatgaccgccgtcagagccaggaaggacagtattatcgccgtcctgaacctcaactcgacggccctcgggccggaagactagaccgtgctttcatcccttcaccccgtcacctcggatgcattcaggttagttacgggactcgtgacgattcggccggggccgttggacacatcgtgacgaaagcacctgcccgactctgcggcgctccgttccgaatctccaaggggtatcgggtgcctcccctttacgcagtactcggaccgtgggtaatgtacgcgttcccgcagccctcaagatggtcccctgttccgccctcgccggggaggatcggttgtccctcgtggcggctagaaatccacctgacccgcggaaattgggttccttcaaggtgcgccggtgcgcggcctgcgggcggctgatgcggatagagctgtcggagtgcaactgcgtccgctgcaacgacctccgcggtgagcccctggaggagggcccttacatcgagaactcgggcccgtactgcgatcggtgccggggcggggtcgagcccacgagccgactgccggaggtggccgtcgcggtgtgtttcctcacggaccgcaggaaccacgacgtcctgtaccgggctgcgggtgcgctggccgaggtggtcccgcgactccgggaagaacgtcggttcgtggcggtggggaccccggtcgacgatctgtacttcaacctccgctgcgggatggaggccgggatcgacttcggaatccgcgcgcagatgtcctcgatcttcacgcacatggggcccgagtacctcgtgatcgcccacaatcccgtgcgtaagctgcggggccgaccccgagagcgcttcaggtacacactcgagagtaacatcgaggagctacgccgcgtgatcgtcctcgaagacgtcgtccgtaacaccgacttcaagtccgtgtaccgggacttgggtcgggagtacccggacgtgttcgttttcgcgagctccggggaggtggaaaagctcgtggatgcactccggaagtaggggatgatcccaacgcttaccggtcgtacggacgacccggaccggttgatgcgcggtctggaggaactgggttggaccgtccgcgagaaaggtgaccgactcgtcgcgatctcacccgggggtcagcaggtggaggcgaatcgggagaccggcgaactcaggatcacgggacggggagagggaacggcggctaggaccctggtcaagctggcggtcaagctcggagccgaggttgagctcgaggggctgtcctccgaagaccggcgccccctagtgtacggcccggtaccctcgcgcaggctcggcacttccctgggtatcgacctcccgcgcgggatgtgcacgcacgactgtgagtactgcagtgtgggggtctcgaggcgcgtttcaccgcacgagcggttcacggtagacccggtcgcggttagggaggagctgtccgagacgctacggcgttgcgacccggatgccgtcaccttcgcgggagtgggcgagccgacgctctgtgcgaacctcagggagatcgccgaggagatacgcccgctcgtggaaggtgtcggggcggaggtagtgctcctgaccaactcgacgtgggtttcggagtgcgcggacgtggtggacgtggccgtggccagtctcgactgcgcccgtgaggacctgtaccggacgatcaaccggccgcatccggacatgtcgctggaacacctggtggaggagctgagccagtgcgatcccggcgacgtggtggtcgaggtgttactatgccgggtggggaagataacaaacgccgatccggaccacctgagggagctggcggatctactcggctctatcggtctcgagagggtacagctcaataccgtggcgagacctccggcgcgaggtcgggcggagccggtcggtcgtgacgagttgctcgtggcccgtcgtaccttagagtcgtgcggactcgaggtctcggtctacaggtagctcagggcgtaccacacggcggtcgtcgtaggtaccgacgtggtcagtgaggatacgagcatcgctttggccatgctctcggatcgtccgggcacgtaggagagtagcagcgtcaccggtggggttaggatgagcgcgggcccggtccatgcggcgagttccgggcgcccgagtaggacggatcccacggagagcgtgtacgcggcggccactccggcgcacggtgaggcgagtcccaggtaaaggcccgctcgcctgacgaccgcgcgcgcctcgccctcggaggcgactcgggatcggaggatgactctcagtccgggaaggccgatgagcgccaacgccggcactagtatcggtccccacttgagtacgcgttcggctaacatctgcattcgggggaatcccccgtcatttaacccccgagactgaccggttcgccggggaggtgatacgggttgaagatcgcgatcacgggcacgccgggtgtcgggaagacgacggtgtgtgaggcactccgtgatctcgggttcgacgtggtgcacttgaataaggtcgcgcgggagatggacgcgatcctcgaggaggacgagcaacgtcaggctaaggtggtggatcttcacgcgctcaggcggtacgtggaggagtgggaacctgagtccgatccggcgttcgtggagtctcattacgcccacttgatgccgacggacctcgtgatagtcctccgacttcatccctcggagctggagcgacgactgaaggaaaagggttacccgcccgagaagatcgcggagaacctggaggcggagttcgtcggtgtctgttacggggaagccgtggaagtacggtccgaaggatgcttcatccgaccgccggaggacgtgatccaggtgaacgtcacgggcttgagccgcgccgaggcggccgatcgggtcctcgaggccgtgaaccaccgtcggggtgacgacgtggactggctctccgacgaggaggcgcaacggacagtcgagcgttacctgaagtaccgatgagggggtcgaagcgtgcgccggcgggaggtactgcgtccgctgagggaggacgacaagtaccgccacccggcggtgttggacgagggggtcaagataataggggataacctggctgatgtaacagccgagatcggcgcctacgctgagatcggcccgtcggtggtaattcgaaggaaagccgcgatctacgggttttgccgggtgttcgactcggatgtgggtgagcgggcgagcatatctccgttctccatcgtgcgcgcggacgtgggtaacgacgcgttcataggcgacggatccatgataggtgcgatcggtgaagatcgggccaagttgggttacgactgtttcatcggcatgagatgtgtggtgtacggtggtgtgaaggtaggtgatggggcgatcgtaggggcgggttcggtcgtcgaggaggacgtagaaccttacacggtcgtgatggggcggccggccgagtacgtgggtgacaccgtcaggataagcgccaacacgttcgtgggcggcgaagaggcgtcggcgcaggctcggatggtcacgcgtggctacgacacagggtgggagacgttgggatgcacggagagtcgcggtgtgaacctgacggtggttactttcgaccgtgaggtatgggagaggctgatgggtctgctcggtaggttccgcggtgaggtggaccacgggacgttccggtttgaaggtgtagagttcttcgggatcgcggcgtcgtccgaacggccaccccgtcgggtggtggacaagatccgtgaactactcctggagcgggccgagcggctggtagcgtgcattttggactgtccgaaaggatacggccgggacgtggtagtccgaagcggtcggatcagcgacgagcgggtgaccggtccgttacgcgcccgcggctcgaggtactatcggcgcaccgaggagggcttgcatactgtttgaagcgttaacggctggtcgccacggccggtgcgtattatatccttccgactgtcgggtgctgggggccgtccggcttgaaggtcgctgtcgtcgccgtgcagggagccgtcgaggaacacgaatcgatcctggaagcggccggtgagcggatcggcgaagacgtcgaggtggtatgggcaaggtacccggaagatctcgaggacgtggacgccgtcgtgattccgggaggagagagcaccacgatcggacgtctgatggagcggcacgacctggttaagccgctgctggagctggcggagtcggatactcccatccttggaacctgcgcggggatggtcatcctcgcgcgtgaggtcgttccgcaggctcatccagggacggaggtggagatcgagcagcctctactaggtctaatggacgtgcgggtagtccggaacgcgttcggccggcagcgtgaatcattcgaagtagatatcgagatcgaggggctcgaggaccggttccgggcagtcttcatccgagctccggccgtggacgaggtcctgtccgacgatgtgaaggtgctcgcggagtacggcgattacattgtggccgtggagcaggatcacctgctcgccacggctttccacccggagctcaccgacgatccgcgtcttcacgcttacttcctggagaaggtgtgaggggaactgaccttggcgtgcggcatcgccggtatcgtgctgcccgagccggggcctgtcggtgctatcctgacggagatgctggatgcgctgcagcaccggggtcccgactcggccggttacggtctgtaccgggacgtcgacacggcggttttcgtcctagagctgccggccgaggacggggaaatggagctgctgagtgaggtcgagcgtgcgctggaagggcgccaactgaaacgggtggagcggatcgccgaagacgcgggcacgcgggtgtaccggctgttcgtggaggggttctcgacgggacgacagggccagcgagagctggcggaagtcgtggagaagatcgagaactcggacatcaccgtattgagcgcgggtcacggcttcgagatcctgaaggacgtgggcacggcggccgaagtctcggagcagtacggtgtcgaggcgatcgaaggcactcacgggatcggacacgtgaggttctcgacggaatcggaggtcgataggtatcacgcgcatccgtttcaaagttacatgatacctaacatggcagtggttcacaatggtcaaattaccaactactacacgatcagagagcgactcgaaattaaaggatatcagttcaagaccaacaacgattcggagtgtatagtagtgtatgtagcggacaagttgcgggacggatactcgctggaggaggcgatggaggaggccatccgcgacctcgacggaccgttctgctttattatcagcactccggacgcgatcgcggtcgcgagggacccgctggggcttcgtcccggtgtgatcgggttcggtaaggacggggctgtcgccgtcgcctcggaggaggtcgcgctgcgtcggatcttcggcgacgagctcgaaggtatcgaacagatcgaaccgggcgagtacgaggtgttcgaggtgggtggccggggttgaaggagagggttatcgactgtcgtgacaaggaacctcgggacatcaacagcgcgctgaagacctacgcccgggagtacgaccggatcgtgctcgagaaccccggtgccaagcactacatcgcggccgggctgaccgaggaggttgaggtgatcatcaaagggagcgtcggctactacgttggtacgatgatccacgggccgcggatcctcgttaaggggaacgcgggctggtacccgggcgataacgtcacgaagggagagatcgtgatcgagggtcacgcgggtgacggagtcggtcagggaatgtacggtggtaccatcgtcgtccgtggcgacgcgggttcacgggtcggtcagatcatgaagaacgggacggtgatcgtgggcggcgacgtggagatcatgacgggcatgtacatgatgggcggaacgatcatcgtactgggcgacgccggcacgtacacgggcgagagcatgctccgcggcgagatctacgtgttgggcgaggtcgaggatctgggtaagaacgccgaagccgtcgatcccaacggtgaggatatcgagcgcgtctgggaactcgtccgcgcgtacgacttcgacgtaacccgtgacgacttaaaagcgttgacgaagatcgtacccaggtcgaagcgcccgttctacggctccgaagagatggaggaggggtaagaacccgtggccacgaccgtcgtgttgtgtagcggcgggctggactcctcggttatcgccaagtgggcggtggaggagctcggagggcgcgtgatatgtcttttcgtcgattatgggcagcggaacgcacccttcgagcggagggctgcggaacgtatagccgaagcggtgggggccgagttcgaaactgtcggcacgttctggctgaggcgcctctgcccggataaccccatgttcgccggtagactgccgcgtgaggccgggaccgaggatctctcggcgaactggcttccggcgaggaactggaacctcctgggggtcgcggcggcgctctgtgaccatctgtacctcgagggggaagacgacgagttccacatcgtttggggtatcaacgccgaggaagccgaacggtttccggacaacaccaaggagttcgccgacgccgtagctgaggcgctgaagcggggactgccctcgcggccgcggctccacagtccgttggccgagttgtacaagccgggcatagtgcgcctgggctcggagctcggtgccccgatggagctctccgtaagttgctacaacccgatctgggaggacgacacgccggtgcactgcggagagtgtgaggcgtgttaccaccgtaagcgggccttcgagcgggcggggatcgaagatcccacagagtatctggagtgacctcgccgccctcgggaccaccgccctaatcgcggcgagtcccatcggccactggcccgcgatcgcctacgggctcgcccacggccttcccgcccccctggttatcgtggtagtgggcctagcagggtacctaccggtggaactgtgccggttcgtgcgcaaccccgacccgaacacgtccggtaagcgcgccgagcagctagtacgacgatacggtccgtacttgggcgtgctgacggttatggtgctcttcggatcctacatcaccctcgccacgatggcggtcgcgggactcggtggtgatcggcgagcccacctctcggccttggcaggttccatgctgctcgccctgctggggtacggtgcgacccacacgacgttaagggcgctgcagccgtggttaatgggtcaggagtggggggaagaactgctccgacggttcggtatacgctgaggtgctacgaaggggggagtaaccgtcagacgagacgtcccctccatggtggtcgataagcacgctcgggacgcaattcggtcgggagccctctcggttttcgcaccggccgttcggagggtcaggggacggttccgacccggtgatgtggtgaagatcgaaaccgcgaccggcgacttcctgggctacgccttcgcccagacttcggaccgcgacgtgcgtagtggccgggctccgggcatcgtggccaggatcttcgatcggaagggagagtacccggagcgctcaccggacgagatcgtgttggagcgtatcgagaggagataccggttcagaaagcggtggaaggtcgacgcgcacagggaccacatgagggtggtgttctcggaagccgacgatgttcccggcctcatcctggacaagttcaacgacatcgccgtgtttcagaccacgtgcccggccatagagaggatcatcttgaggaacgcggctgaactactcgagatattggatgtggacacgctttacgagaagaacgattcaaggaagcggcgacagttggggatggaggtacggaagagggtggtggctggagaggagcgagtcgagaccgtcgtagaggagtacggggtgcgcttcgcggtcaacgtcgaggaaggtcagaagacggggttctacatcgaccaggtggagaaccgcgcgaaggtgcaggagctggtggatggaggtagggtccttgacgtcttcacgtacgtaggtgggttcgcgatccacgcggcggtaggcggcgccgaggaggtggtaggtatcgacaagttcgaccgggtagtccaggccgcgtaccgtaacgccgacctcaacgacgtccgagaccgtgtgaagttcctcgtaggggacgcgttcgccctgctcgagaagttcgaacggcggggagaggagttcgacgtcgtggtcctggatccaccggcgttcgtcacgtccaaagagcatctgaacaggggacgtagggcgtacttcgacgtgaactacaaggccctggggctggtccgggacggcggcctcttcgtgacctgctcgtgcagccacttcttggagccctccgacttcgtgagactggttaacgaggcggcagcccggcggagcgtgaggctcaggatgctcggtccgctgcggggccaacccccgtgccatccgatagtacctgggaacccagacaccagatacctcaaggcgatgttctgtgcggtggagcactagccgatcggtagtgcgatgtagagtgcgaagatgtaggcgggcagagtgaatgcgaggagcatcgggtggatagcccaatcgtgaggacgctcatcggctggtttcggatcccttatccacttcaatagatctagcagtgttttcgtaactacgattgtgtatacgacgacgagtactagttctgtctgatgcatatggtagtaccacaatcgcatgaaattaggtgcggccaagtacagctgatgggccttctctacagctaatggtgtggaaaagcccagtagttgaagtgctggataccaccgtacatcttccggtacgaatacaggagcgttacatacagcggcaggaagtctgctgagtgcgaggagaaacggggcagtgttgaggaacccgacacaccatgatggcagcaaccagacggcgaatgggaatacccataggtagatccaggcgatatagtaggggtttcctactttggtagttagggcaaaccataacatgaacagagctgcggagccccaaatagtgtgtttcaagccagatgttctaatggattcttgtaggatttcacgacgtttccaaagccacaaagctagagttacaaatccgagaattataagtggtcccgatagcttccctataatgaagtgataggggtaaacgtgccatctagttaggagtaatgggatgtttagaggggtaagatcttgagggagtctaagcatatgaaataggaatgcttgtttccaaaaggcttctggatcgtacagtataaagggtgaccagagtaaagctactgtgattgcagaggttaagaaaaatatctttgctgggcgtgaaccgtacttttctttgaggataagagtgaacggaattacgagtattccgggcacatacttgaaactagaagctaaagctaaggagactccagcggcgatgggtcgaccacggcgtacgcatacagcagtgagtgctaggaagaacgcgataatagtatcgaactgataaccccacacaaccatacccataggtactgatatgactccccactgagcgatcggccactcgaactcccgaattattactaggcatgtaagcaggtagaatgcgactaaaaatatcttaagagaaaattggaacgtccatgggttggagtctaaacctaggttgtggatgaggtcgcgcgtggttatgtaaaagactacggccatcggtgggtagtgtactttttcgcactctgggtagacgtgtagtaggcctttagacatcgcgacacggtaccactcctcaaagtagtggacgtcgtaccagttcatcatcactggggaggttgtcaggaggaagaccgctgcaaggagggggaccgctaccgccaggtaccgctcgtgccgctcgttacggacccgaaacaacttccgccctcctttatcatctttcagaaatcgcttccatcgcctctctcgtagcctccttaacgactttaaccgaccgtctgaacgctctcatctcgtcttcttcgagctctatcggtactatctctaggacaccctcccggcccagtctggctgggaccccgatgcagacgtcgcggataccgtcgatctccccgtccaggtacgcggagaccgtcagcacgcggcgttcgtcctgcagtatcgtccggacgaggttggtgatcgcctgcgccggtccgaactgtgatcctccccaggtctcgatgatgcgctgaccggcttccttcacttccctcacggcttcttccacgtcgaaatcctcccaccccggcatcctggtgaccgggatacctccgacgctcgtggaactgatcaccggtaccatggtgtcgccgtgctcgccgattatgcgagtgtgcacttcactcatgtgcacgttgaaatgtttggcaattagaactttgaaccgcatagagtcaaggtgagtaccgaggccgatcacgcgattcttaggtaacccggagaccttcagagccacgtaagtaagcacgtcgacggggttcgtaaccacgagcactattgcctcggggttctcctccgcaacaccttccaggtacttcttgatgatcgcggcgttatccttggtgaggtcgagacgggtctggccgggcttcctcgggatccccgccgtcatcacgatgacgtccgcatcgacgtagtcgtctcgctcgcacccgatcgtgatctcggcgtctttttgtgcggccgctaacgagtccaggatatcacggcggagcccgcgcagcttatccacgcttttaggcctggcgatgagggtgacctcgttcacgcagtccagtaacgcgaggcgggcggccgcggtcgaaccgacacgtccggtcgcaccgatcacggccactttggacactgttcaggtcaccccatgaggagagctaagatggctttctgcacgtgcaagcggttttcagcctggtcgtagatcacgctccgctccgagtccgccacgtcgtccgtgagctcgtacccacgttgtatgggcatgcagtgcatgacgatcgcgtgctcgggagcgtgtgacattaattcctcgttgacctgatacggccggaatacccgcaatcgttcctcccgttcggcttcgtcgcccatgctcacccacacgtcggtgtacacgacgtcggcttcgcgtacggcctccttaggatctcgaactacccgggtctccgaccccgattcctcggcgcgacgctctacctcccgccaaactctgtccgggcactcatacccttcgggcactgcgtgcacgaaatcccaacccaaagtggcacacacgagggccagggacgaacagacgttgttcccgtctccgacgaaggcgaccgtgtggggacctcgaccgagcttctcccggatcgtgaaggcgtccgtaagagcttgacaggggtgttcgaggtcactcaggccgttgatgacgggtacctccgagtaccgggcgaactcctcgatgtcttcgtggcggcgcgctcggatcatgactccgtccagatacctgctcagcacggccgccgtgtctttgatcgcctcacctcgacccagctgcaactcctgttttgtgtacgtgaaagcctgcccgcccagctggtgcatggccacctcgaaggagacgcgggtgcgggtggagggtttctcgaagattaggccgagtgtcttgccttccagtatcggtattaccctctcgcccgcgaggtagcgttccttgaaccgttcggccacgcgcaggaccgtttcgacatcttcccgatctaaatccgcgatggaaaggagatggttggtgctgaggcgcttcaacctcactactccccacggattcgcttcatacggcgcacccgcttctcaacggtctcatgctttccgatgtctgaccggtgccgaatcctttccccgctcacgcactcacggatcgcactctccgcggcttcttccgcctgctcgagctcgtcgccgatacccacgatcgccagggcgcgggaggaggtcatccggatctttccgtcctcatccaggttcacggaagcgtagtacgggaccgcgtcatacctatggatgcactcctcgtccacctcgatgacgtctccctctccttccgacgactccgggtacccttcggggacgacgtacttgcacacggtggccttttcgaggaactcgatctctccctccatcgacccctcggcgatcgacgcgtgaagcgttacgatgtcgccttcggcgatcgggaggatgttcatggcttcggggtctccgtaccggcagttgaactcgatgacgacgggaccttccgcggtcagcatgaactgcccgtatagaacccctcggtacggctcaccggtttccttcttgatcgcctcgacagtgcgttctaggatctcgacggaacgttcgtaatcctctttagttatgaacggtaacagaccatcgggacacgagtacgagcccattccaccagtgatggggcccttatcaccctcgtacgcgtgtgggtgatcctgtacggctggtgtggggatcaccttttccccgtccgtgtaggcctggatcgtgtactcctcacccacgcacttctcctcgatgatcactttggggatcccgccgatgtcctcctcgaagatctccttcacgtattccttcgcttcgtcgagattcttcagctggtcgccgaccaccttcactcccttaccgccggtcagacccgccggcttgacggctacgggtttaccgagctcgtcgatgaagtcgcaagcctcgtcgggatcctcgaatatcccgaactccgggcggcccggaatgtcgtacttctccatcagctcgcgtgcgaagcccttatcccactcgatccgagccgggccccgtttcgggccgaacgtggggatgccttcctcctccaggcggtccgccactccctcggccagcgggtcttccggccccaccaccgcgaagtccacgttccagtctgcggcggctcgagccaccgcttccacgtcggtcgggtctcctacgacgtagtcctcggccagtcggatgatacccgggttccggttccccatgaacgcgtaaagctctacgtcctcgtccggagctccgcaaagcgcctctgcgatcgcgtgttctcgggcgccgctacccacgagcagtactttcagcatcccgcagcccccgcaggtcgtcggccgtcagcacgctcgagagcctcacaccccgctctttaagcgcttcttccgccccctcctgtcgatcgaccacgacgacggcgtcccgcacctctccgccctcctcttcgatggcttctaaggcctccaagagtgaccctccggtcgtcgcgacgtcgtcgacgagtacgaccttccggcccctcacgtcccctacgatccgctccccggttccgtactccttcttccgcttccgaactatcgccatgggtaatccggccttcaccgagagcaccgagactagcggaaccgctccgagctccggtccagcgagtacatctccatccggtaggacctcgaggagggcgtccgtgagcgcgtcaagaaccttcgggtgcgtgcaggcctccttgatatctacgtaatagtcacttcgcttacccgaggagagcacgaaatccccgaacttcagtgcccctacctccaacaacatctcggcgagtctctcccgattcatcaccatggcacctccttcagcttcaggaggtatccgatgacgttggtcagccagtggagcgccagggtcaggatggccagaccgactagcacccaacccggtgggtgccacccgtacaccagatagtagagcagcaccgccccaacgaagaagtccagctgatcgagcaccggagcgggtgctccgcgttcgagcccgatcctgcgcttcacgaagctgcctaccgcgtcgccggccatcgcaccgagccctagaataaacccatcaccggctttccaggggtccccaaccacgagcccctctccgagtcccaccacggctcccgccaagacgcccacgataaagccacggatcgttacaccatcacccagcagtcggcgcccgtcagaaagctttttaccgaaatcgagcggtctcccgccgccgaaaaggcacgcgctcaagttcgcgatgtacgccggtaggatgaaccagagaccctttccgagttccaaccatgccccgcttcccatttcaaccatcccctcgggggtccggtagtgagcgacaccctgtacgagaccgagagcctctgccccgaatgtctccgagtggtaccggcgaggctcgttcggaccgccgaaggttccgtggagatagttaagaagtgcccggaacacggtgagttccgcgaagtcgtatggtccgatgtcgagttcttcgaacgcgccttcgagtacgagttcaagggtcccggcgtggagaacccacaaacggacagcgagaacggctgcccactcgactgcggtctctgcccgtgccacgagagtactaccgctctcgggatcatcgacgtcacgaaccggtgtaacatgaactgtcccgtatgtttcgccaacgcagaggctaagggttacgtgtacgagccgtccctcgagcagatcgaggagatgcttgacttattacgctcggagcgccccgtgccggctcccgcggtgcagttcgcgggcggcgagccgttagtccgtgaggacatcgtcgagatcgtcgccgccgcggacgagcgcggcttccacgtacagatcgcgacgaacggtgtggagttcgcccggaatccggagctggcggaggatctccacgccgccggactgaacgtcgtgtacctgcagttcgacgggctgaaccccgagatctacgaggagatacggggctccaggaaggtcctcgagttgaagaaggaggcgatcaaggtcctcgagcgcgaggggatctccacggtcctcgtacccacgctggcccgcggggtcaacgacgatcagattcggcccatgctggacttcgcccgcgagttcgaggtcatccgcgggatcaacgtgcagccgatctcgttcacgggtcgaacgccgcgcgaggagcgggagcgcatgcgcatcaccataccggacttcgtcaagctcgtcgaggagcagacggacggccgtatccccgccgagagcttctacccggtcccgatcgcggcgaagatagcccggctgattggacaactccacgggaagcggaagccggagttctccgcgcacccgatctgcggggtcgccacctatctactcgacgaaggggactggtaccgccccatcaccgactacgtcgatccggacgcgttcatcgacgcgctggaagaggtcgcggagaaggcgggatcgttggatcgaaagcgggatcgagcgaaggccgcttggatcgtgaccaagtacctacggcgcgtcttcaagggcctcactggcaaacgcaagctggcccgactggtcctcgacgtcgtgactaagggaacctacgacgccctcgcggacttccactggaacgcgctgctactgggctgtatgcacttcatggacccgtacaacttccagacggaccgtgtgcgacggtgcgtgatccactacgcgacaccggacggacggatcgtaccgttctgcccctataactccatacaccgtgaagagatcgagcggaagttcggcgtgccgctcgaggagtggaaggaacgccggaacgggtgacacggttgccactccgcgaggcggccgagagggttgtagaggccgagacagtcgtcgtgctcaccggggccggcgcctcggcggactccggtatcccgacgttccggggaaaggatggactctggaacaagtacgaccctcgggaactggccacacccgaggccttcgcacgcgatccggagaaggtttgggagtggtacctctggcgccgccgtaagatcgccgaggccgaacccaaccctgcccacaccgtcctggcgcgtatggagcgggacggcctcctcgaagccgtcatcacgcagaacgtggacgggctccaccagcgggccggatcccgtcgcgtgatcgagctccacggcaacatctggcgggacgagtgcgtatcctgcgaataccagcgagtgaacgaccccgagcgcggcgagggactcgagtacgacgagctgccaccgaggtgccccgagtgcggggatccgctgcgccccggcgtagtctggttcggtgagccactgccgtctgacgcgctcgtggaggcggagaacctcgcccgatcctgcgacgtgatgctcgtgatcggaacctcgggtgaagtccggcccgccgccgacctcccgctcgtggccaaatcctgtggggccaccctgatagagatcaacccgagcgagactgcgctcagcccccacatggacgttatcatccgagaacgagcggcttcggccatggaagccctatggaacgagatcgagcgactcctgtgatgatatgtggattttcctccggatatgggcccctaccggccggtttccatgttcctgcgcgatgatttgtgcgataccacctcgcaacttctactctcaactccactcccacctttgggtttcgcggcgagagagtaatgcatgtgagaacgaggaatcgagtcccggtcgcccgaagacggccccgcccgatgtgggtacctcctgccggtaatccgttcggacgacacgacttcttcgtgctgtcacgatctagggggatccgcacgtagttccaagttcttcgttaactagggcgcgtggagatactcaatctcccccgatgaccaggtctgcctcccctcaagtaccggcccggtgggtgcaatccgtttctccggagcgtccgaagtgtcgcacaaatctctgagaaggactcgttcccccgaaggtccgcaacagtcgatcctcgtccgctcccgtactccctcgaggtggatcgcgctgagtaatatgaacagagagccagagcggctcacctccgctggccatccgctcatccaccgtcgccgggagcggtccgatcatcgccggaccgtgagggactccacctcgacacccaactcccgctccacgagcctgagcacgcgttcgccccaggccagcttcttcctcttcacgggatcggcccggaaaactcccctgccttcaccgggtcgggagtactccgtcgtgaggttcccgaagtccattcccacggtgagcacgcgctccgcgcccaacctcgccgccatgaccaccgcccgatctccatccgtgaagcctccgaaattgtgcaggaggtcacacggtggctcgacctgacacgttcctaggatcctgccgagagtgggtacgagttccgccagctcggtcacgttatccccgtgggcgtgtacgaccgtgatggaaccgcactcgctggacatcagcaggtactccttcggtccgtcgagatccgtcacgacgacgtccggtacgattccgagctcgaggagggctctacaggcgccgtcggcggcgtagacgacactgtcctccagctccccgacgatcttcggcagctccgctatcgagggaccggctcccaccacgaccacctcttcttcgaccggcaggtcctccgggcgtaggacgcggggatggtcgcggaggagctcgcacaagaacgaggcggcccacaggtcctcggactccttataacctaggtccgcccggatctcctcgattatccccttcaacggatccgacaagggggaaccccgcgtggtcgtggtcggcatcgtgggtgcatcaggttacaccggaggcgagctccttagactcctcgcccgacacccggaggtggaagaggtccgctacgcgacctccaggaggctcgagggaaagccagtctggaaggtacacccgaacctgcggcgtgactaccccgacctcgagttctcggaccctgatcccgttgaaatcggcgaagactgcgacgtcgtattcaccgccgtcccacacaccgccgccatggagctggtcccggatctactggaaggaggggccgtggtgatcgatctcagcgccgatttccggttcgacgacgtggatgtctacgaggagtggtacggcgtcgaacacgcggctccggagctgaacgacgaggccgtttacgggctgcccgagctacaccgggacgagatacggcgcacagacctcatcgccaacccggggtgctacccgacaggcgctatcctggccgccgcaccgctagtcgaggaagggctcgtcgacgtcgtgatcttcgactccaagagcggtacctccggggccggtgcgaagccttcggaggtcacccaccacccggagtgcgccgaggacctgacaccctacaacccgacggatcaccgtcacttacccgaaatacggcaggagctggggaagttgggcgacgtcgaggttcacttcaccccgcacctggcgccgctcgtccggggtatcgagaccacggcccacggtctaggggatgtagagatcgagccgaaggagctccgggagctttacgtggaatactacgacggtgagcctttcatccgtgtctgcgaggtcggtgaggctccgcggctctgggccgtccgtgggaccaactactgcgacgtgggcgtcttcgcggtaggtgatggcagggtcgtcgtagcgtcggcgatcgacaacctcaccaagggcgcgtccggtcaggcgattcagaacatgaacgtgaggttcgggttcgaggagaccgcggggttagaggagcccgggtatcatccctgaacccgctcccgtacgagctcctggaccttccgacatccctccttgtctcccttgggtaccagggcgaaggcgcagcgcctgtcaccgagcccccaacatgcgtactcgatcgcgtagtactcccggccttcgatggcgccgatcatcccctggatcaggccgctctccaggtgcgcacagcgtctcacccatctccggggctccacaacacgagatgcagtcgtacacgaccacgttatcgtagcccatatccgcgacgagctcgtccgcttcgtcctcctggacgcccacttggacctcgccgcaccttatctcctgcaagtactcgcacgcgtcctccacgtccgagaactccatccgcttgacgatctcgtgtccgagctgttccgctcgcttcctaacctcaccgttcgcttcgaggtcccagatcaccgatctcgcgatcaggaacgccgtacgatcgatcttgcggttgcacgtctcaaccatctgcaaaatgtcctccagcctcacgctggccccgcggagtctgaagtgatcacggtgataatcatttttccacccaccgccggatgtcgcgctcacacgcgtacctccagcccgggaccgacgttcaggaactcgaagcgtcgtcggaacatgcgcttcgcgacctcaccggagcagtgacaaggaccggcgatcttcactccgagttcctcgagacggtccgccaccttctccacctcgatctcggtcgcccccatcaggtggaatccgccgagcactgtgtggacttcgagccctctcctcacgcaccactcgacgaactcgtgtatcccggggtgcgcgcatcccgtgatcaggagtccgttcgcgtacagggctcgctccggtggtggtccctcgaggacgtccgtgagcaccatgtcacctattcccaaccactcctctcggacgagctcgttcttcaccccgatccgttccggggtcacgatcctggccacctccgactccgccgcctgcaacccgccggtgtgatcccagtgattgtgggagatgaccaccgcggtcagatcctcgggttcgtagccgagccccttgaggttgtgtagcaggaggtccgggtcgggtccggtgtcgaagagcactcggtgacgcccgtcctccaccagtgcggcgaaaccgggaccggaccgcaactccggatccagtggcggttcgtccgacaccaccaccgtaaccttcaacgctacgtctccccgtgagccgctgtcgccggtggacgccgttaccccggaccggaactgacttttcctttccttggaaaaatacatccgtcccctccggccggggagtgccggggtcaacaatgagcgagggcgaggggatgggggagctgcgtgagagcatcgccgaagagctcaagtcccagccgaaacacaggaagctggcgttcgcgttacttagctcgttcaggacggctgcgctgagacacctgggtgaatcgtgggaaccgataatcatggaagctagcaggcagttccttaagattatcaagattatcgaaatcgcggagggcagggagatagagggcctcgaggacgctttgagcgtcgccgtggagtacggattgatcggcggtttcgagctggatgaggacagtgttacgctggagggcgtattggagagcctcggctgggacgagcgaacgtgtcgcggcaaggcggcctgcatagtgactaaagggatcgtcttggagggacttcgtcgggagggcttggatgtggtagagctggaggaggacctggacggagatcgcgccacgttccggtggaggacccggtgagctacccccaccctccttcgccccttaactttaccaccgatccgacttccatctcacggtttgggggatccacactgcgcgtgctccaagtcgtggggccgaaggactccggtaaaacgtcgttctgcgaggaagccgtcaaggagctgcgcgggcgtggttacagggtgggctacgtgaagtcggtaggcggacacggtctagaccttcaggatcgtgacacgggtcgcgttcccgcggacgtacgggtgggtgtagctagaaaggaaacagttctgtttctcgatttggacatagatgctgttctcggactcctcgcgctgttggggctcgactacgtacttgtcgagggattcaagtcccgtgaactcggcgtcagggtggggttcggtggctacacggagggtcccacagttcccgcggaggaaatcgatacctcacctgcggacgctgtggaacgttacgcggtgaagtacacggccgacatcgactgtggtaggtgcggtccgggatcctgtcgtgatttcaggcgggcggtggcgcggggagaggagaacccggacgggtgcgccgccccggaggacgtcacggtgctcgtcgacgggaaacccttaggtctcaacccgttcgtaggcgacttggtaaagagcgtggtataggcgctggtcgggagtatgaaaggtggaggagggaacgacgtgatcgtagcgctccggcgttgaaatcggaccccgttggaaccgtacctacttaatgcgcgccgtccggacaccaacccgccacggatcgaccacgggtcggaatcggatgacgatcggttgcgaacggagcgttcgcgatgaagagggctgtactcgccgacctcatacctccgccacgagtcgtgcgtgagacgcgtccacgatacgacactccaaccgctcgccgggttccgggacttcgccccggaacaccgtcttcttcgcgtgctcgtcccgtccccacttctccattaccatcgtcacctctacggtctctccgatcagctcgcggttcgcctcctcggcccactcgaggcgcttgcggtgaaggattcggctcctccgtagcttcacgtcctccgggacctgatcctccatccgcgccgccggagtcccggggcgtcggcagaacctggaagcgtgcaggatgtgcggtcgggtcctctccaggaacctgagggtgttacggaaggcctcctcggtctcccccgggaaccccacgatgacgtccgtgatgaaggagaagtacccgagtcggcgctcgaaggcacggtacacctccaaggcctcttcgaccgtgtagttccggttcatacgacgcagcacctcgtcgtcaccgctctgcacgggcatgtggatggaacggtacagcacgtcgtctcggctagcgaagaggtcggcgaggtcgtccgagatgggataagcgtgaccggggttgaacatacccaggcgaacccgggcgccgtagcgcgagcagagatcgaccacgtcctccagcagctcgacgacgttcgtcccccggtccagtccgtacgtcgcggtgtcctgtgcggtgaggtgaatctcgacggctccgcgctccagctcccgcttcacacgccgcaggatgcgctccgggggaaagctgcggaggttcccacgtgcgagcttcacggcgcagtacgcgcatctgttcggacagccctccgcgatcggtacgatggcggcgaggttaggcagctcacggggagcgtcggccttccagtcgatgtcttcacgttcacccaggaactccactcgatcgccgcgcagcacggctcgaacggcttccggtatgcggtcgaggtgtcgggggcctacgagagcagcgtccgggcggagcttgcgggcgcgctccgggtaggcttccgggaagcatccggctacgacggtcggcacacgctccagctcgcgcatcctgttcaccattcgggcgtccacgctgtcccgaacgatgcaggtcaggaggacggcgacgtccgcgttctcagcgtcttcgaccacctcaaaaccttctcggcgtaacagctccctcaccagtctaccgtcgtcgtggttggcggcacacccgtacacctcgacggcgaccttggtcaccgttatcacccccagcgtctcggtatttccgtgacgtacgaaacgaacgcgttgtaggctactactcggtaagcctccctgctgatcctccagtacatcctgatcgagaagatcaaggaaagtccggcggccagaatggcccccgtcaggtaacccatcgggaggaagctttccccgaagtacttccataccagcagctccgtggctggtaccgcggatgtgacgagcagtgcctcgaggtccctacggaaggtgaggagctgcgggtaaatgtagacgagaatggctcccggtaaacttccgatcaaatacatcatcaggacgcttatattcgagacatggacttttaagaacaacgcgccggtggccgtgagcagcaacggtatcgcgtacttcctgggcagcttcaccgctccgagtcccgcgaagaacgacagagcgccgagcacggccagtgagatgtaccccagagtccgatgcacggagatgccgatcgcgagcatgatcaaagccgtgatcaggccggcgagcacgagcgtccaggcgaggctccgccagtacgccttcatgacgaactctcggagtgcgtacattccgtcccagtccacgcggtacaggaggtcgagcttctcctccacggagtcccagaacttgatcgccgccaaggtgccggcgaacagtggcatcatgccgacgaacgacggggagtccagtgggaagtacgggaacccgtacttagaccaaactaggaacttatcgaagaacattactaagtaatacgcgattgcggacatcatcatgaccgagtagtccgcgaacgctgcaatagctactttcaggcttttaattagtagattgccgcgcgtgaatatggagattttagagattctattcacaccttggatgacatctatgaaagatagtaacatcatagctaccagtatagtggaggctactaaatacgcttggtccgcctctatgatcattagggagactataaatgaaattacgaaaagggcccacggcatcgttactcgacgagcgattaatcccggacgagcccaagaaacggcggaatgagcggccgtaaacatgtatgctaatgtggccataggggtcgctatagtggttgctagtgatatttttatgttgaacagctgagttaattcattgtaaagaataatcgaacatacggtacaaaaaattgtcgataatattatgattccaggtatgggtatgaacgtttctagaaataaggtgtctaaaattacgcgtgaaacaagtacttgaaagggggcggaagtaaggacagctgcgattagtgagaggctcactggagctagtttcgtcgatcctaggactatgagtgtggacagcacgaagataactccgagtacaggggaagcgcctaagacgatttttatgagtacgaccgggttactggcggctctacctactgagcggattatcgccactaatgtgtcagatattgcgcccaattcagtcacccctggcgtatttacagtactcccggaagtagtcatgacacatgcgcattacatcgtactgtttggcgcgtttggtggcatgatgtgccatctcgaacattaactcgggatcgtagagtaggcgtaccaggtgcctggcggcttcgtccgcgtcctcggatcggaaggtgcgaccgaagttcctgtcgactatgtacggcactgcgccgacctcggaggctactaccgggcatccacagctcatcgcctcgaggagtgccattggcagtccttccgagcggctcggtaggaggaagatgtggaacctacgaagccacttgactacctcgtctggagtgcagggaccgtggaacctcacgatgtcttccaggccgtactccttcacgagtttccggcactcctcgtagtacgcctcgtcttccactgggcctaccacgtggaacacgacattgcctatgtgctcgacggtgcgggccgcgatctcgataagtacgtcgatacccttgacgcgttcgatcctcgtgatcgtaccgacctcgagcacttccggctcgttgtacttcctctccaggtcgccgggagagtacttccaggtctctattcccgagtaaacgactttgattttatcctcaggagctccctgctccagggccagctccgcgtggtagtccgagatttctattatctcctcgcactgctcgtacgacgtgagcatcatcgagcggaagcactccttgaaaagctcgcgtgtcgtcctcccgtacccctccagtcgcgtgtcgagctccctaagcagtatcccgtgctcggtgatgataaaggggacattccgtaccgccttcgcgaccgagcacaggaacccgcatactcccgagttctgggcgtgcgcgacgtcacagttcggtagtcgtctagcgccggcggccgcccctagcacgaaggatgctatgttcacggctacccagaacacgtcgctgaacgggttattctcgcacttgtcctcgtactgggaggctaggtagtgaacgtatcgtgcgagctcgtacatcgtggagctggcgagtacgctcgtgggcgacttggaaaccttccacagctccttcagcattggctccgaaagtggttcaccttccaccatcctctcgaaggtggcccggagcgttttcgctgcggtcgaccacctgaggcggtgtgtgggagttatcctgtcgagccaccggcgcagtttgttccccttcgggacgatctcctgaattacaacatcccggacgtttgccggaatttccacgactggttcggttctttccggccccgtcatgcataacacgttgaacacgacatccggtgaatacttgatgaggcgctggacccaggtggtgaccccacctaaagctacgggataggtagcctcggttactacggtgacagtgggtcgtttgtacatcccgcttccccgaaattccaccatagagtggtcggcctggagctgggtccacgcttccttcctttcggtttctttaggtaataaccccagtgataggagtcacccccgtccggtgtagccccatcgcccggcgaggaaacggtatctagtacttaattctttgactggatgaaggcatgtagttatctggtttcgatcactgttgtgtcgggtggaacgtcctcgggtcgggcgatcactcgacacggtcggatctcatcccccaagtcgaccggccaatggaatcccgggagcacgtcttcgggaacatccaccatctcggctttcgttccctcctcggcgtggatcggcggtacccgggagctcacacaaagttcggcacccaactgagatagggtcaagagacccgaggtcggggggactgaaaaggccctctccccgtcgatgagtacgcgctgtccgtcgaatcggtagtccacgttctccaacacgtcgacaccgaattgaaacctcgaaacggctcggggtacgtgctcacggagatccccgggctcacccttcgtgagatcctctagggtccggcggagctcctcgagcgcccccctggaggcggggttcccatcggggcggcacgtgtaaacgacatcgtatcctctttcttccagctcctttccgactttccggtaaccgtccgcggcgtggcacactatcgggaggtctcccactatcttctcaataagcgccgccgagcgctcgatctcctctcgactccattccccggtgactcgaacgtcgtagtgggcggcgggaaacgtcctctccagcgccctcggcacggcaccgagtgggctggtgatcatgatctcatccacggggaaattccacgttattcgcatgatacgtcggtgcgtgggcgatcgtgagtagggtttccgggcggagcacgggagcaggacgaccgcttccacccaatccgggggttcgtaccgacgaacgcgacggagccactcggtgacctccggacggtcgaacgataggtcggtagcgcaggcgatctgggtgttccggttcaggttcacgtatcgggcgacggcacgttcccggtcgcagacccgtaggacttcggcgatcctggggtgcctcgcggccacggactcgacgagttccctcaaagtgccctcacggatcgcttcgcggagcctcagcaggcagaactgtagctgagtccagttctccctgagcagctcttcgcggtcctccgtctccacggtctcggtcgagaagtcgtccaacagcagttgatcctccagcgtcagacgtagacacagtgcggcgtcgaagaggtcgaacccgaggtaaaacagcagggggatccattcgggatctcgcaccgtcacggcacggaccgagccactccgacgtatcttgctcactacctccgcgaactcccgagcgtccgggatcgactcgagccggtacaccgtgatcgatccgtccgaaagggcttcggccgggtccgtccacggggacggcaggtcgtccggcgtgagtcgtacggagtacggccgtgccagttcctcgagctccttcacgagttctcgcacttcggggacgttctctacggcgacggacagtcgttcggggatgaggaagggagccggggtttctacgccctccacctcgaggacgcgcgcgcaatcacaccgaaggacccggactttatcccgcaccgacacccaacacctccttcatctcgcgatcgatctcctccaggtcgcgtcgggtcttctcggcggcctcacgcgccaggtcgggagccacgcccaagtacttctcggggtccaacacctcatctaactcttcttctccgaacagctcacggacgcgctcttcctccttaactacttccgcgaagtcacgtccttcctcccaagccctcatcgcgagccgtctcacgagctcgtgcgcctcctgtcgccctattcctcgcttgaccagttcgaccatcagtgcctccgccatattaagccccttcgtcagccgcaggttctcccgtatgttctcctcgtaaacgcgtaatccctccaagttgtggatcgtcagccgcagcatttcgtccagcagcaggaactgttcggggaggatcacccgctcgctcgcggagttcgtgaggtcccgctcgtgttcgagcggcacgttctcgagcgctatctgcacgtttgaccgcagtaccctcgccaggctacacacccgctcggaacggatcggattccgcttgtgtggcatcgtcgaggatccgacctgcttctcggggtcgaacggttcctcgacctcccggatctccgtccgctggaggttcctgatctcgcggccgatcttatccagcgtcgagccgatcagcgcgagcagtgcgatcaactccgcgtagcggtcccgctgaatgacctggttggacacggtcaccggcctgaggttcagcagttccatcacccgacgctgcacctcaggacccttctcgcccagcgccgccatcgttccgacggcaccggacagctgccccaccagtacccggttcgcgcactcccggagtcgcttcaggtgcctcacgacctcgcgtgcccagatcgcgaacttcataccgagcgtcgtgggaaccgcgtgctgaccgtgcgtgcgacccaccatcgggaggtcggcgtactcctcggccttctccgccagcacttccgctagacggtgcagcctgcggtagattatcgacagtgcttcccgcagtaccaacgcgtgcgcggtgtctatcacgtcgttgctggtagcgcccaggtgcacgtagtccccgccaacctcgcaccgctccgatagcgccttcaccagggccatcacgtcgtgtttgatctccgcctcgatctccttgacgcgttccacgaaccgtcgtagctcttcctcgtcgccggtgatctcctcgacgacgcgttccacctcgtccgcggcctcctccggtacgaagtcgaacacctcggagagcgcccgtaccagggccgcctcaacctcgagcatcttcgccactttgttctcttccgagaacacccggcggagctcgtccgatccgtaccgtgactcgatcggatgaacgggcaactcagagccccctccggtcgggacggctctccgcatccctcgtggtcgacggcaacctaccctttcgtcatcgggggtaagttatcccttcaccggcgcaccgagaccttctgggcgtgcaccctacggaaacccaaagatctggcgtactcttccagctcgaccatgtcctcgtacttggggagtggcaggtctctacgccgaaactccggtcgatagtccaggtaacacacctggacgtcctctcccaggtgctcgtacagccaatccgtcagcgcgaagacctcctccttgtcgaccagctcggggttgtacggtatcccgacacccacgaagacttcctccaggtattcgtccgccaggtactccaggatccgtagcaccccatctacgtactcggccgcccccttcacgtctattccggccacctcggcgaacgtctcggggcggaaccccttcacgtcgatccctatatccgtcatgcccgcctcgaccagctcgtcaacgtagtcgggggagaggaccgtaccgttcgtgtcgacgtgcactcggaggtcgggtccgccgtactcacggcacttcctgacgaattccacgaggaactcgcggttcagcgtcggctccccaccggagatcgcgacgcggttcacgccgtactctcgggccgtcccgaccagcagtcgggccgcctcctccggccgcatccgcgcgcccatcgcggccccgaaggcgatcgagtggttctgacattgagggcacctgaggttacaaccgtgcgcgaagcacgccgcctcgacgtagcccggcttgtccttcagctcgaccggggtccccacaccgccgacgggatgcggctggaaaccgctgacgacccggatctttccgtcgacgtcctccgtctcgacctcgtcaccctcggtgagcttggagttgcaggccggaaccacctcgccgttgagccggacggcgcacgcgtagcaacctcccacgccgcacggggcgtcgacgtcgtgtcctatctcccggagggccccttccacccaccgggattcgacctcgacttcttccccgtccacccgtaccgtgatcggtccttcctcgacctcgactaacctgcgggcgccgtacgggcaggccgggacgcacgcgccgcatccgacgcagtcctcacggttccacaggggatcaccgacgggacagtccaccacctgggagcaatagccgcagtgcctgcatccgaccagtcggactttccggaccaatccacgcccctgaatgatgagggggcgtaggggaagaagttcgttacgacagtgcgtcctttccgcggtccccggtgcgcgcgcggacggcgtcctcgagcgggatgacgaagatcataccgtcgccgggcctgcccgtcttcgcgtgctcacagatgatgtcgatgacctcctcgacgtcttcgtcgtccaccacgatctcgatcagcacattatccaacaggtcgatccggtactcctcaccacggtaccggtgtgtaggctttggaggccatcctctcggcggcggatcccgagacgatggtcaccgtcttgtcgcaaaacgaccactggaacagcgcgagcgctaaagcggggtaacatcgacttcatcgggtcggcagcccacgcttcggccgagaacagccccgacaaccaacccccgagtcccttcgcgtactcggggaacgcgatcgtgaaatccagtagcatgaacgcgacgactgtgattctcacatctaccaggcactccatgaaaaaccgaggctgacttgattctaagaacatgaaaccgacctgcatcattacaacgagtgccatcgcccgaatcaggaaaaaggatcgcacccagtccccgagacacaccacatcgctagtgcctaatatagatcgccgacgtctgccgacaataatttcctcaactttcatccagcaaggctttccggagaggcttgactattggatttattctgtgatcatttaccggaaagatctgcctgaaagagggtgccggcaatggacgtcacaaagctcgtcatacattatctactggtgatcgcaaaggtagcacctctggtattcctggggttctttttggcttcagtaatgataatccttcgagtacatgagaggttaggaaaactgacgggtaggaggctggcgaggttagggttgacccccgaagccgcgtctgcgatggcggcctcgctcgtgagtcccagcgcggggtatcccatactggccgagttccggcgtgagggtcgcttggacgatcgtgacgtggtgttgctggtcgtcgctaccacgttccccactaccgtgggtgagatgttcctgaaagggccgttcttcgcggccctggcgatactcggtccgaaactgggaacggagtacatgggtgcgctcttcgttaccgcgctgctccagacgctccctgccttggcactgtacggagcgcgctccggcaacgggtccgacatccatctgccatcgacgtcccacgacgacgtcccgcccctccgcgaggccgtgatcgaggggctacggcgtgcggcccgaaggatgaaatacgtcctacctaggatggtcgggatcggattacccatggtgatcctggcggaagtccttcggtcgtgggtccacggaggcctcggtccggtggtggcgatcaccctcgctaacgtcagccactacacggtcgggtacgccacggcggcggagctggttcacagaggagtgctctcggagagcgaggcggtggcggccttgctcatcgcgggatgcgccaacgtcctgatgatcttcctgaaggcgtcgttggcgacgtacgtgtcgatcttcggctccaggctgggtcttcgggcgtgggccgcgaacttgggatccagcgtcggagctcggctcctgatggcgtacgcgatactgcgatggtcgtagctagggagtcaactttataggaccgaacgcggcggctcggttcgcctgaaaagacaccgttcgcggcgatagggaagagatgcaagtggggtgttcccgtggctgaggagaacgtaatctacgtcggcaacaagcccgtgaccaactacgtcctggcggtgatgacgcagttcagtgaaggcgccgacgaagtgaaactcgtcgcccgtggccgtgcgatcagccgtgcagtcgacgtcgcggagttcatcaggaacaacgtcatgccggaggtcgaagttaaggacatcgagatcggcaccgaggagatcgaaaccgaggaaggcgacaccatcagtgtgtctacgatcgccatcaccctggccaagccgtccgagtaaaacgcccctccctcccctcccctgagggtgcccgacttgccggagctcccatcagtggaggatctgatgtcgcgaaacccggttacagtggacgccgaccagtccctcaagttcgccctgaagaccatgcgcaagcgcaaggtgaacagactacccgtcaccgagcgcgtgtccgaggaccggaaggagcttgtgggcatactcacggtcctcgacgcggccctggccgtcgccgatgctatgttcggtgaccgttcaccctcgaggattaaggtttcggaggtcatgtcgtcacccgtgatcaccatctcacccggagccaccgtcctcgacgccgcccagaccatgctggtccacggtgtctccgggctcccggtgctggacggtgaccgcctcgtcgggatgatcacgaagaccgacttactggagctcgtgcggtccgaggactacgtggcgcttcacatggtcaaggatcccatcacggtgtcggccggtaccagcctgcttcacgcacgtcgactcatgttcgaggagaacgccaaggtgcttccggtcgtcgagcgcgagcggctggtcgggctgctgacggaccgcacactggcactcgagcttgccagactccgcgagaagtcacccaagggcaagttccgatccgcactcaagcgcgcacgcgtggatgacgtgatgagaacgccgatctccgtacggaccgactacggcctggtcgacgccgccgagctcattgtccggaaacgggtccccggggtcccggtggtcaactaccaggacgaggtcgtcggcgtaataaccaaaaccgacctcctgcacttactggtggaagagctggaggcggccggctaattcttaacctccaccaaccgcccgtcggacgggctcacccgggatggccgagctcgccgtcggcatcgacgtgggcggcactttcactgacctggtggagtacgacgggcgggagctccgtgtccggaaggttccgtcgtcaccccggcggcccgaacggggcttcgcggaagctcttaaaatcgtcgagacagacccggatgttgtccttcacgccacgaccatagggaccaacgcgtttctgggtcagaaggggcttgaactgcccgaagttgctctcgtgacgacactcgggttccgcgacgcgatcgagatcggacggcaggttcgtccccagacctactcgctgtcaccccgaaaacccgaaccgctcgtacctcgacggctcaggttcgaggttaaggagcgtacctcacccgacggtgagatcatagtaccggtcgacgaggacaagctccgtcgtatcgcccgccgtatcgcggtcgaggacgtcgatgtggtcgtcgtcgctttcctccacgcctacgctaacccggccaacgagtgcaaggcgaaggaggttctggaggaggagctcggtgacgtcgaggtagtatgttcgcacgaggtatgcaacgaataccgcgagtatgagcggacttcgacggccctcgtcaacgcggtcttacgacagatcgtcacggagtacgtcgagaggacctgggacgccgtccgcgacgccggtgcctcggagtactacctgatgcagtcggacggatacgccgtgccggccgagctcacccttcacaccccggccaagctcatcgagtcgggtcccgccgccggagtcgtcgcggcccgatacctgggtgaaacgctgggtagggaccgcctggtctcgttcgacatgggtggaacgacggctaaggccggtacggtcgtcgaaggccgttacgaggtgactaaggagtacgaggtgggcggtgaggtacacaggggtcgtagggtgcgcggttcgggataccccgttcttcatcgcttcatcgacctgacggagtgtagcgccggcggtggtacgatactctggaccgacgaggccggcgcgctccgggtgggaccgctgagcgccggagccgatccgggtccggtttgctacgggaagggaggtacggatccgacgatcaccgacgccaacgtcgtcttgggacgcctcaaccgacgtgccctcctcggcggcgaaatgcccatcgacgccgaggccgccgatcgtgcgctctcggagctcgcggacgagctcggactcgagccggaggaagccgcgtaccaggccctgcgcctcgccgtcgaggagatggcccggatcgtgcgtatagtcacggtggagcgcggccacgatccccgcgagttctcgctggtcgctttcggtggtgcgggacccttacacgcggcggagctggccgagatcttggaggtcgaggaggtgatagttcccctccatcccggcgtgttctcggcgtacgggctcctagcggccgaggtcgcctgggaacacgtcaccccggtcatgaggacgctcgaggagctcgacgatgaggagctgcgcgcggtcgtgagaggtaccgcggagaaggcggcggagcgcctgccgagggaaccggacgacgtccggatcgtcgtggaagcgaggtaccgcgggcaggcgcatgagctcgaggttcagacggggccggacgtgacggcggacgagctcgaggaggctttccacgagcggcaccgcgccgttcacgggttccaacttaatgccccggtggaaatcgtcaacgtccgcgccctcgcggtgatcgagcggaagccacccgaaccgagcccgctcaaggagggtggagaagggaaccccaagcgtgcgctcgtcgagacccgggaggtgtacttcagggaggagggttacctggaaactcccgtgttcgatagggacgccttgagggccgacgacatcgtcgagggaccggcggtcatcgagcagtacgactcgaccaccctcgtaccgcccggctggagggcacgcgttcacaggtcgggtgctatcctgctccaccggatcgagtgaggcgggaacactccggacgtgtcctcgtgcctgctcgttcccgaggacacaaccatcggatgtggcggagccttggtgggtccgttcccgcattgctgacgggaaccgcctcggtgataatccccgtcggactgggaatcttggggaccgtgtgttggcggggaaggcggagatcctaggtgaggtggtgctgtgcgtgatctacggctacagggtggccggtgcggtatcggagatcagcgggtctctatcctcgcgctggtatggacacgcgcggtccacggaggacttggcggtgaggaccgtggaggaactcgggaggtcgctcggctgggatccggaggaggtgcgacgatggcaggcgatcgtgcggaccatcggtgacctcgcgaggaggggccttctctgagcccccgggatattgttacagtttccgtaacgattctgggttggagccgcggccgggatttgaacccgggtaacgggatatccgccgggaccgtgcccggctgcagtcccgcgcccagccaggctaggctgccgcggcgatcgcccgggccgtgaggcctgctcccctaccagtttttaagccttaccctcaggacggcggctcgacgccgggggtcctgtacaggtacacctcggcccactgacccacgcgaacgcccccgcgtacgatctcgaaggcgcggaccctgacttcgtcgggctcgaagccggcggcctcgatggcgagctcgaccaattcttcgcgactgtacacgcggccccgatcgacttcgaacctctctccggcgggagcgacgtgtccgtacccgcgctcggtgtgtacgtagactacggcttcacgggcgtgacgggcgacggcgcagccgacggcgttgcagacgtcgtgatggggaaccacctcaccgacgccggttagctcgcggagggcgggcgcgagggcaccggcccagaggacgctgtcgtgcgtctcgaacctccgaagcagctcccgacgaatggtttcgagggtttcctcggccacctcatggggatcgccgagctcgcggaggacgcgacgagacttggatggatcgccgtcgggctccggatcgtggtatccggcgactaccagggcgtcggtcagggtgggctcggaaccgccgtagcaggccggtgtggcggtgtcgttggtgattccctcaccggtgaggacggcgttgccgccgtacgggagggagcggacgatggcggctcgaacggcggtcggatacccgaaaagctcggccccctcctcggtgaccgggcgcccgccgcgggcctctgtgagatcgatggtagcgccccctacgtcggcgaggaggaagtcatcgcggccggtgaggtaagccgcacctaggacgccggcggcgggtccggagtgaaggacgttgacagggacgcggagggcctcctcaggagtctggagtcctccgtcgccccgaagcacgccgtcgacgcgaccgagggcctcgaggaagcgacgggtgacccgtttgacgcgggcgccgagtacagcagtggcgacacggcgtgggaagttgccgtaaggtaggtggtagccggggaccgcctcgacgtaggtctctcggtgggcttcgatgatcttccgctccggatccgcgttacgatgggagtgcttcgcgacgacggccaaggcgtgatcctctccggaaggctccaccgcgtcggggtccggttcctcgacgatgtcacctcgatggtcgacgtaaccggggagaacgtcggcgcggtcggctaggtcgaggaggggctcggggtccaagccgggaccagggataaggacgaggtggacggggtcggtgcgaccgcgtgtaagggcgttgatcgggagggtggtgctgacacgtcgctcgtcggcgtcgagcgcgcggagggcgcgacgggtgggttcgaggagcttaccgtcgcgcggtaccttgacgcgatcctcgacctctccgtcctcgaggacgacggcgtcgacgtgggtgctgccggtgtcgagaccgaggacgcgcatgttcggtcccccggtgacgtcgggagtctcggtgcggggctgagcggggtgcgtcgggggccgaggactaatcatcgacgatccggagctggaactcctccctgaccgtgccgtaaggaccctcgtagcggactaccagtcggtacttgcccgattcctccggtgtgtagaattcgaactccacccaatcgccgacccaaacctcaggctcgctcaggtcgatacgaccgagctcggagtttccggcaccgttcagacgaaactctagggtaccctcccacagagggccgccgccgcgaagagtgagtaaataaggccggacgaacactatcgccgaggagccggccggggccgataccggggcgaagatctcgagcgtcagcgctactccgcggacccgggagatgacgacggtcggaacgtacttaagacccaatcgagccatcgacctctcccactccagccgcgcgtcctcctcgggatcgatgggggtcaatccccggcccccttcgacccgtccgggcgacggcgctggcccttgggccccgccctgtttctccacgaaaaagccttgcggacggttagggtaaccaccgtccgctgtcttcggcgtacgggggccgtacgatggatcgcacggcggttcgctcacagtaacggtcgtgcccgcacgacgtcgcgagggttcgaggaacccgctcgaccgacggtggactccaatccgtggttacaaaccgtgtcgtttcggactgtttgtttgattcagtgacgcgacaccgatgcaacgatgccgccggagtactgaacactcgtccgcgtagcttccgaggccatggtaggcacggcgggcgaggtacgtgcgagagaattcagtacgtgccgtggatgtggcccatcacaacccctcgacgaggacggcgagttggcctaaaagcagcgatctgatcgccttcggtacgagagcttccgtcatccgcgcggacttcctcatggcgtcttctacggtatcgcggtctacactccagccgtccgaagccagccgtgtcccgacttcgagtatcgagatccagaaggccgccgcgagctccgatggtccgttgcgcagcgcgctgcgtacccgaagctgcttccagtaccgcttcacggagtccatccaccactccagtgtttccccctggggtgcctccagtctaatggctcctaacccctctacggctctctcaccgagcacctccgctacggcggtgagcaccggatcgaccacgtacctccgaccgtccacgatcaagtccagatcggagaagtccgcgacgtcctccggacgtacctcggcggcgctcacgactcggaaatcggtcgggtgaagtcctgtgtcgattctcgggattgggagggtcagtcccgtcacgtctaggttgagcgcctcgggtgcgtgcctctcgaactcctcgggcggaccgtgacgcgcgtcccacgtggctatgaacatcagcccacggttcaaagcgtccccggctcggtccaagatgcgacgggcggcgtccggacccgcgtcgtggacgtcgtggatcgatatcccggactccgggtcgcccacgccccggtagaccagcaggtcgtcggagaaaaacacgtgggcacccacgttaacgtcacagagcaactcagtggtagccaccatcaggcagcgactggagcggatgatttcgcagttcttcccgcggcagctctcacaaggtaggtgctcgacgaagaccggcgcgaaacctcgggctgcggctaaaaccgccaccatcgcggcgtagctgaactccatatgcggcatcctcccctgaccgcacggtgcgagccggggcttcgactgaccgtggcttgggtagatttgtccgagcgttcggtagcacggtccccgtgcgtcgtgttccgctcgaccgggtcgggatagggggaccgtctccctggttccgaaccctcgacggcaccgaacgagcccgacggacactgctaggacgcgggatgggaagtgtaccggggcgtcggaggtcgaagcgggagttggttcgtggtccccggccgtaatcgggtacgcgcgccactcgccgcgcctcggcaataagggacgtcgtcacccgtcggtaagccggcctgtcgtcatcggagcgtgcttccgtggaagttacgggacgactccggaagttcggcgacgcgcgcggacgcggtaatcgtcatcattccacgattacgtcggcacccgatgacttttcgatgcgggcgcggcgcacgggagccgggccgattcacacgaaaggtttaggcggcgtgagccgtccgggcggccgtaccgtcggtgagacggccgtacatcagccaatcatccgccggagtgtctcaaccgatgactctacttccacccctccaccgaccgggagttccacaccacccaacgccgaggcccgctcgatgacctcgtccgcgtgttccactccgatgaggttctgaatcctcttgatcctcgagtacaagctctcctgggcgcccttctcttcccacagggggtcgtactccttcggctctatctcgatccatcctaccctcaccgtcgctcccgagttcaggatgttctccgcgagctccgtcggctgtgacagaagctgtatcagctccgcggccctctccacggtgtccacgagtatgtccgatatccatctttccacccgctcgtcctcgatttccagagctgcgatggcctcctccaggtatccgttgaggagctccagttcctccacgggaccgagctcgacgttctccagaggctcggccagctcttcgagtgggggaagcctgttcgcgcacgtatgacagaggagtgtgaagatcgtccaaacccgggccggtgatgcgaacttcgggacgatgtctccgtattgaatctccagcgacgggagcgcctcgacgatgcactggtccgtgtctaccgccttggccacgagctcggcggccttcccgaggtcctcgtcctctaagaacccttccgtacacgccatgagcgcgacttctaccagcaacggacccgctacggtctctaggcagggttcttcgaggtacttgggtaccgccgataggaaggcacgacgtatctccagtaggtacccgagtgcgacgtctggtgtttcggtaacttcttcgagggccacgcgaagctcgaacacaccgctcaacgaccatcgggtgattcgctccacggcatcgaccagtgtagcaggatcatccaaaacctcttccaaaaggaaccgaaccggatgaacgtgatggatctcctcccctcgaagtgcgcggacgagcggtttatccgggtcaagcgtcgaaatcatcgcgcgccgaaagagttcgaagttctcgagcacctcacaaggttccgataccgcggcgtgtaacttctccagcaccgacggtttcggacggaccgggacctcccaccacttcaaccgacactccccggtactccggtcgacgtattacaatgttaagtttgcaggaatgttcagtcaggtggtcgcagtcttaagagagatatagagatattatgtgtgggggcgctgagagagtgcgaacactcggccggcgaagtcagcttcagggggcgcctcctcatcccttcggcgtcggggacgttcttcatccgtggagagtcaccttagaccgagcaacctcccgagtagattcagtagattggtcccttccggtaacccaagctctcgggcgagctcccagagagcgggtgagacctgagctctccttcggacttctccccacaagcgctccacggaccggtgaaacgagctggggtctcggcgtaacctccgggatagcccgtcgaaaatccttcgggcctccccttgcagtgccgcccacatggtctcgtaggcgagtttgggatctccggggatttcggctatcccatagcggtatcggatagacgggcggccagccaaagataccctgctcctacccgaaaccccgttcttccgagctcttccacagcttccgcgccccctgaagcagcacccgggctgcggccacgtctcgcgggtcaggtcttccacacagtcgccgtctgaaatcgtggattatcctccaggcaccgtacacggtcagggggatggtgaccgcgaagaacaccagacaagccgtgctccgagcctgtagggcttcactaagacgttcccagtgaccggaaaagagcgcccacgtggcggccccgaccgcggtcaagttcacgacggctaccaccgtaccgggacccgctcgcggtccccatagcagccggagcagcgaccataaggcaaaaaccgccaataatccccctagggcgatatggaggtacaccgggtggcccccactacatccaacgctgtcgcgcctatatcgacgctacgtcgcgcggtgtaggggggacacagccggactcccacccccgtggcgcgataccggtcacgaccttcccgtggtgatccggactccccgttcgccgtcatctaggtcgagcgtgtggattcacctcatcctcctcttcctgagctcctcgatagagtcatcgaggaggtcgtcaagcgcgtcgtcgcccaccaactcgcccgcttcttccatgtccagctcgtacaaccgctcgaccgccccgtttgcttcctcctccacgagctcacgaacgcgctccacgaccgactcgtgtacttcctcctgtggacccggctcccaaatggggtcgtattcgcccggctgtatttcgacttcgcccaaacggatcacggcacccgctccgggtatcttcaccgccagctcctcccatcgggaaagggtgtccgcgagctccaacgcgtgttccacgctgtccaccagaatcgagcccacccagcgcagaacctcctcgtcgtcgatccccaacccacctaccgcttcatggagtgcttctcgcaccgaatactctatctcatctatcggccccggtctgagctccttcagcggtttcaccagttcttccggcgggacggtacggttcgcgcacgtgtgacatagcagtgcgaagatcacccaaacccgagtcggcgacgcgaacctcggaactaagctcccgtaccgtacccccagttccggaaggagctctaaaacccgctcgtccacacccaccccgtcggccacgtactcggcggcttccttcagatcctcacgttccaggagtcctcccgcgcacgccatgagcgcgacttctaccgatagtggctccagcacgctctccagacccgggtcttccaggtattccggggttctccgtacgaagaaccgccgtagctgaaggaaatgcaggaggactatctccgcgggatcgacggtacccctcagtccctcccagagcccggatacgccgcttatcgtccagtgtatcagccgctccgcggcttccgccagcgtactaggggtgtccaagacctcgaggagaaatcgtatcggatgtgtctcctcgattccctcgcccttcagcagtcccgcgagaccttcacaggactcgagcgtcgagagtaccacccgtcggaagatctcgaagtccccgagggtctcgcagggcttcggcatcgccacgtgcagcttctccaatgcggattcctccggttggagcggatcgttccaatccaacacggctccccgtagactcgggtggtgcgttcggcttacaaagctttgaaagccccgccttccggacggggacgcgatcgccggagatacccgctagaactctcgagtccagagcggcaaaggtatcgggtggatcggattcgctgctaatcggaagcggggtaccgagtgccaatcgctgattaacggctacagcatcggggtctcagggactacccagactcaaagctgttgaaaccgattgaaggacttgggttacgatcccgggtccccaggatccggtttgggagcggggtcggagactgattcgaagccgaactcaggaacttctgaacctttccgtcgcccccgcgagcccttagcctaggcgagggaagttaacttccggaaagtatcatcacgccgtgaggggatcacaccggacccgacaccggtcgatccagggccgatcgaaccccgaaggggtttaaccctctggcgaatggcgggtgggagggttaccgcgtgctcgagactatccttctggccaccgtcgcctggacggttcaggaccacgatcaacctttcgccacatattggcaggacgtgaagttttgggagatcctggagcgacacccgcgcacgctcgtcgtcgatccctactgcggtcccgacgaccgaccttggaccaaggacgagatccgcaccctacgcgagcacggtgtgaaacccgtagcgtacctatcacttgccacggtcggcaagcaccagacggacctgtacagtctcgcggaggagaagggactcctcggtccgcgggacccgtactgggaaggggaccgtgcagttcgattctgggaacgcacctggctcgacgccctccgcaccaagttcgaagaattacgggacctcggctacgagggtgtgttcatcgacgttgtggacccgtggactctggactggtacgttaagtggttccgtcgcgaaaccggcgagaacttggagaaactgcgtgagttaacttacgatgcactcgaggaactcattcaggcggcactacacctcggcctcgaagtctacgtgaacgtcgggggcgcgatcttcgatccaaagctcgccgagctcaaggaacgttacgggttcaaggtcgtcgttgaggacgtgatcaccgacgatgagggtaatctcgtcccggacgacgtgttccgtgattacctgcgcgccctcgcacacctaggctcgggcgtgtacgtgatcgagtacgacctgacgatgacccccgaggtgaacgagcggctcgaagaactcttcgcggagacgaaggtggaggcggtgtacgtgacctcgctcgaccacgatcgactcgggatcgacatagttcccatcaaggctccggtgaacccgtcggacacctcggggagctcgggggaggagaaggcatcgtacacgcgggagaacgaggaagacttggagagaatccccgtggaggagctcgtggaggaaggtccgaagaaactgccggtgatcccgatagttcctccggtgcgtcgacgatgcctatcgcatgggtaacactccggctctgccccttcacgaaaatcctccgaagtgctgtgcgttcggaattcgacggcttaccacgcgtttcgaggagacgtgagatgggtcgcgctgtgacaacggtcccggggctcgggtatgggatcgccgggggccccggtccgtcggctcaccggctcgttgtgtctggtgctcgtggaagaggctactaccgtacccacgttccccggtgcgctgtacgttctggacccacccggtgaaccgggacgactccgtgagggtcccgagctcaccgacgaagagggaagatccgtcgtcccgttcgtggccctcgtcgagccgccgctacgggaagttatccgggtcgaggggacgacactccacgtacacccggacgccgtcgttcacgtggacccggaccaaccggttgtactgacaggatacgcgtgcgacgatcgtcacaccgtcaccgccgttctgccgtttcgctctttcctcgtagcgctggatcacgcccgtcacgggccacctgatccctacgaacttttcgaggtctttgcgatcctgtatgacccgattcaggcggccgccttcaccctgaacgcccgtggacacgcgctcctgatcgacgagcacggagtgaacgaacatgccatgctctacacgactccgccaggtcaccccgggcccgaccacatctcatcccggcacgtgcggccgagtgacctgcagggagccccgaagcacgtcaccggcgacgggccgcccatccttccacgcgaccgctacctcgatctgctcgcccggactcagttgatcacaggtgttccggaacccggacgcgccgacttccgtctactcgagaacgtgcacgagtacgttaggcccctccttaccacgatccacctcgcacaccattgggaaacgcgacaggttcacgaagaaaccggacgcctcgtcgccgagattctcaggggagaccttcacagagaggtcgccgatgctcacaagcgggcggtgcgtgccctcggatcccgataccctactccggcttacgcccccgacgctcgtgttcgctgggctcgtcagctcgccgggcctgtctccgaccgcgtcctcacgaaggtacaggatttcgcccgtctcgtcgcctgccatcgtctcgtcaaccgtctttggacgttcgtcgataccgtaacgctgctcggatacgaggagtgcgtggacctcgtcgagatggcgtacagctacaccgagcacgaccttccgggacacgagatcgagaggcttctccgaccctggatcgacgcactccgggatccccactatcgacgtttggagcgggggaccgcaccgccacctaagttgcggctcgtcgaacccgaggagcccgaggacttgctcgtgtgttacgaccgtctgctgtgatccggctaccggaggtcagggttgggccgtggggaaaagtgatccggaaaatttttaccggtgggggccggcgtgcggccggcaccgtcggaaccgtcgacgtccgtgagcggtctcggacggcgtgtccgtccgccgaaaacctggcctccctcatacaccctatccatacggtgcaatgcgaactatcgtgggatagtagaccaagattcactgtatgtccgactccagtattaaacttcttctaaagctttcagtaaatcctccgccttgacagatctcgtcttacctaacactctctcaatagctttatcctcgtctttgatagcatagatggcacgtccagagacccgattcgactctattaatccttcctttttgagtctacttgccagagaatagattttgcgtttgttcacgttattgtaacctaacttacggagaactttcacgatttcatcacatgttatccccatattaaattccctatacgccacacatatggttgctaagacagcatcggttaatgataacctaccgctttttaacgcttctttgacctttcttagtctctcatcttccgacaagtggggcagcccccacaaccccatatgctgacgtgggaccatctatcctcaaagcgttactatgggatgttccttatataaatcctgcggaacgtctgttggctatctgtaatgggtgttagaaaatagcaaggggaagtgtgtgatcgtatggtcgaatgttttcccaacggagtgtaacatctgctcactaccccatcaggctttcatggtggggccgattaccgtcgattggaggattcgggggaagctcggccctgcccagtcctgtcatccccgagtgggtcgacgttacaacccctccccatcgccggcgggtacgtatactcgcgttagagtttaaccgattccgcccatcgtttcgttcgtcgtaacgacagggggagggttcgttgcgttgtacgcgctgcggcgaacggaacgccgagtacgagcgtccgtacgcgggtgacgcggtttgcgggcggtgtttggtcgaactggttcgggatagggtgttccgcgagatcagacggtggaggtggttccgaccgggacagcggatcgtggtggccctttcggggggtaaagatagctccctggccctacggctcgttacggagtacgtggaaccgctgccggaggtcgaggtgatcgcgttaacggtggacgaggggatctccgggtttcgggacgcgtgtctgcgggcggcggagcgggtcgcggacgagctcgacgtggagcacgaggtcgtctcgttcgaggaggagtacgggttcgcgctggaggaggtcgtggaagacgtggacgtatccgcgtgcacgttgtgtggtgtcctgcgacgacggttgctgaacaggcgggcgcgggagctgggagcggatgtcgtggtaacgggccacaacctggacgacgaggcgcaagccgccctgatgaacttcgtgaaggccgacctggcgcagctggcgcggctacacccggaggtgaggccggaggacgacctgatcgtgcccagggtgaagccgctacggggggtaccggagcgtgaggtgcgatgggtggcggaagagctcggtctgccgttccacgcggacccgtgcccgtacgcgcgcttctcggtgcggtcgttcttcagggagatactcgatgaaatggaggagcggctgccggacgtgaagttcgggttggtgcgggcgttggacagggcgggtccggtgctggcggaggcgtttctggaggagggactcgggcgttgcgagcggtgtggcgagccggcggctgggaagctctgtaaggcgtgtgaactgctggagcggttgggttagtcggagaaggcctgctcgatgctttcgatcaggtcgcgctcgagacggcggtgagcacggaaatggcggttggggtcctgaacgacggtgtaccaccagtagagggcgaagatgccggccgtcaataaggtgagcacgaagtacaggaaggtactgcggcggggtacgacgtagaacgtctcgagctcgaacggtggctcgtgggggttcatgtcgagtaggcgggcgacactctcgaggaaatcccgctcgcggacggagtgttcgtggaggtccctgttcaggaagtggtagatgtagagggctacgagccaccctatgggcgggacgagggtgaggagggcgtagatcacggggttccgacgctcggtgtggagacgcatctcctcgagctcggatctcaggatgtcaacgtcgtaccccacgccggcgaggagctccacgaggtatcgtaggaaccccagggacctcgtcacgtgctcgttccgacgcttgatcatgaggtacatcaggtacacggccagcgggtacccgatgagcgcctcgaggaggcctaagaggaccaggaacgtcgcgtgacccgggaacgtcttggccatgacgatcgtgagccatccaaggaacgtgagtacctgcgggaaaaacgcgaaccacaccggcactatcctgtcctcttcgccgtagaccgtgctgtgctctcggagaccctggagcgctatctctgggtccacggttcagtccccggccccatcctcgccatcgccctcataacgcttccgaagatctccgaccaagcgggcccgggtcagcggggcggactcccggtcgaccttccggcgtacgtcctcccactcgggtttcgcgtgatgcacgtcctcgaaccgtgagaccttgacgcggatcccgtcgacgtccacgatcctccggtcggccgtgacgcgagtgcaccggtacacgcgggctcccaaggtacccgtccagcggaagagctcccggaagacttctcgttcgatccctggccgatcctccgtcacaactcggatcacgaacctcggacgccccttcttcccgaacccgtggaggacctccacgtcatgcacgccttcgagctgcagcacggcctcgatcagctcaccgaccgcctccccgtcgacgtcgtccacggaggtttcgacgatccgaacgtgctcgccggaccccccgggctcgcagatgagcgcccggaggacgttcggacggtccggcaggtccttggtaccggccccgaacccctgccgtttcacacggtagggaggtggcgggtccgggaggagctcgtcgatagttcggagtagggcggcgcccgtgggtgtgaggagctccccctccccctcccggactatccccacgtcccactcggacaatacctcgacgaccgccggggccgggacgggaagacgaccgtgctccgtctccacggtcccggaacccacgttcggggggaggacctcggaggctttgggattcaggtcctcgaggagcgcggccgtcccgacgaggtccacgacggtgtcggatgagccgagctcgtgaagatggcagaggtccccgtgaacgcgttcctcggccctcagcaggtacttcagggcgagttcaggaagctcgcgccagcgatcctcgagtacgttctcggcgaccgttttcacggcttctcggagctcgtccggatcgcggaggtctccctcggcatcgacctccacccggacggcgcggatcccgcgcttctggatctcgtggacgtgcacgtcgacctcgtgacctagggaggagacctcgtgcacgacctcctcgagacggttcgggtccgcgccgacggcgatcaacgctcccaggaccatgtccccggaggcaccggccacttgcgggtcgagtgtgaggatcaccggaaacaccccgcgcgccgcggatcataacgttgtaaaccgctcggtgcctatcacggtaggggtatccggcgtgaaggaggtgcgcctcttcgtggatcccgaaaacgtcgggcgcgtcatgaacgcgatggcggacgtcggcgtgacgggtttctacgcgatcgaatatcggggtgtggctccggatcgttgggccggcttcgagatccgtgaggatcccgagagcgcgatcaaagcgctcaacgacctgtcggagcgggcggtgatgatcgtgacggtggtcccggaggagtgcgtcgagaagttgaaggacgctgccgcggagcgcctggcgggtgagcggtacacgataatagtgaccgacgtggaggagatccacgtggattacgggcgttagtggaacgcacgcttcacggcgtcgacgacacgcttcgccttccaaatgactcctctcgccttgaccacgcaggtccccacgacctcatcttcctcggccgcacacctcacctccacgaggtccttgaagggtacgttccagtgctctagggtttcggcgagtgcaccgcggaccgcgtgacagatcggttccttgaacggcattcccgcgcactccaggcacttctcgacgatgaaccggtcaccttcgagggagtacgaagatccgcttatctcttcgacgtgcccgatgagctcgtccggatcttcgggatcgaacgcgttgatgaacgcgcgggcgtacaaccgacccgcacggaaaaacatgggtcgggccacgtcgctgagggcgcaccgcaggaggccctcagaggcgatcttgaatgccgcaacctcgacggcgtcgcgaccgtcggcgctcatgacgatctcgatgtcctccgccgtcatctcgtcgacctcagtatcgaaaccgccgacttcaccccgctcacccaggatgaactcgcatcgcctatcccctgtcgcctcgcacgccacctgtgccacggacactacctcacccaactcgtgttccgccgcccgcgagatgaagccccgtaggaagttgcagacagctccctcggcgttcacgtatccgaggcattccgggcagctctcgatggccacataattccggtccaggtcgtaatccgctccggtgagctcgcagaaggtgtgaagggcgtcctcgagtgtttcgacaccgaagaagccggcgagcatcctacccgccctgaacacggaggcgcagcttcgctcgcccccgagcgagtaaagagccatcatcaccatcttgttcgtcgccaggagctcctccgcggtgaacaccgagccggcctcctccgcacgttcccgtaaactctccggactgaatccgtcgtctatcatgcggcgggcacccccggtgcgccgcggcgcgatccctctgaaacggtgaaatttccaccgcgccggaccgaccgcgcgacagctgtaaacttcccggaaaagacttacctcttccgggatggggaggacctttggggcggaggcacgccgatgacgtgaggccggctttgccgacctacctccgaccgatcaccacggtcttctcctccgtgaactcccggaccgcctgcggtacgccctccctgcccacgccgctcgccttcaccccgccgaacggcatgtagtcggcccggtagatggtggactcgttgacgattacaccacccgcctcgagcttcctcgtggccttcacggccctgtccaaacgttccgtaaacacggcggcgtgcagcccgtagtcggtcgagttcgcgatccggatcgcctcctcgaagtccttcgcccgaatgaccgggaggacgggtccgaacgtctcctcccgggccacgagtgcgtcctccggcacgtcggccagcaccgtcggcgggaagagcctaccctccggctcgccgcctgtcaggatctccgcgccccgctccacggcgtcctcgacgtgtcgtcggaccttctccaccgcaccgtcgtcgatgagcggtcccacgtccgtgtcctcgtcgagcgggtcccccaccttcagcgactccgccacctcgacggcggcctccaggaactcctcgtacacgtcctccaccactatcgcccgctcgaccgcgatgcaaacctgacccgcgtggtagcaggccccgcgaaccgccgcctcggcggccgcttccacgtccgcggtctcgtccacgatcacggggtcgttaccgcccagctccagcgtgatcctggggatcggggagatctcacgcaggtgctccccgactgatcggctccccgtgaacgagagcgcgtcgaagtccgcccgggcgagctcctccccgagctcggctcccgggccgaccacgacctgcagcgccagtggttccacgcccgcatcgagcaggatctcggccagtctgagcgaagagagcggtgtcaccgtcgcgggtttgtgcaccacggaacaccgtgcggcgagggccggtccgagcttgtgcgtcggcagcaggagcgggaagttgtacggggtgatcgacaggaccacaccgactggctcacggaccgtgagaatcagctcggccgtccgaccgcgctgcgcgtcacccggtagcgtctcaccgtacaaccgctccgcctcggccgcactcagtcgtaggacctcccgcgtccggtagacctcgtaccgcgcgtctcggatcggcttgccaccctcgagcgcgatcagctccgccagctcgtcctcgtgcttcttcagaaggtgtgcggcctctgccaacgcctcgcgtacttcgtacgtgggccgctctctccaccgccgttggccctctcgggcgtccttcagtagcgcctcgacgtccacttccggagcgaggacgcggcccacttccgaaccgtcgtacgggttctccactacgatctctcggtcgccttcgagccactctcccccgatcagacacccgtactccaacgaaggccccgccgctcaggccggctctacaccttagaagcggatcggtctcgatcgacggcccgactccgccgctaggtcgagcagcttcgggagtgtctcccaacctaggtccagaaacgtcgctgccgcccgttgcagttcgactcgctcccgtgcgtggcgcgcgaacgccacggcgacggggaaatggagtccgtcacgcgtccgcttcacctggagtaccagtcggaatcgggctcgtgcgagccgattgtaaacgctttccacccggcccaacacttcgtatagatctcccgtgggaccgaccgcgacgaggaagtagccgtcccggaacgccgcgaacctcggtgatcggtccggcacgtccccgaactttgcctccacccacctcagcgccgcgtccgtccgcgagagcacgtccacgggacgacgcggttcccgaccctcccacaggagcgagcctgcacagaggtccgattgtgcgccgacacctcccagcagtgagaggagctccagcgcccaacccagacactccgatgcgaactccacgggatcgtccgagtagcggctcaggatcgaccagggtaattctcgactctcgactctcacctccaactcgaacaccgagccggccggatacctagggagctcgtctccgaccagccggaactccaccgccgggaagatcgtttcaccgtttaccgttccaccgaacagtgcggtctctatccggcgtacctctcctcgctccaaacaccgccccagaagcgcccggagatgccgacgcaggtcttcccggaggtcgaccacgaccgactcgccagtacgggatgtgacggggctgacggcccgtagccggacggtttccgtccctgacaacccccgtcacccgatgtgacgttcctgaaagtaaaggtcccgggacgtggaactggtctcgaccgggtagtatgccgaacgctccttagctcttaccctccgcgggctcatgagagggcgtggggggtaacgcctccgctaacctctgtgactcacggtggtcctcgtaggactccctcgccttctcagcccgtgaacgtttccatgatgccctttcggtaccgagtcacgagctccaagagaccgacgtcgaacctcccggccagcttgcattcctcggtcgggaagaagatcctgaccttgcaggtcacgtaccgcagattcctgaacgtccgtgcttcgggtttcagtccagcgcgctcgatatccttgctcgtgatggccagctcgttctcctcggccacctcgaccagcttcatcggtgtcctggctccggcgagtagatggtcggggacgctcctgacgaggtagtacgcgagcccgtacgtggcgatgggcccgacgagagtcggcacgtacatgatcccgccgatcctgatcgcgtatctggcccgtcccgcgctcttcctgaagtgcccctgtaggagctgccgcctcgcccgttcacccggtgtggtgagccaatcgtccggtagttgctcgacgaactccctgaactctcccctggctatcaccggttccattcccctgaacacaccgtgcttgcaccattttttcgcccacgtcgtcggtggcttgttcttcaagtccctgagccgtacgacttctccgagcgcgttcctgaacgctacttcggctatgccccactggcgtctgtcgcgggcctcgactaggatcctgaacgcccagccggccagctccggccgttcccccgccaccttctccgcgagttcggcaagctccatcgtagctccctcgtgaacgattgagtggatcctcggtgtacggccgcccggcgtcgatcggaaccctgatcacccgagtcggcgaatactgtttcggggcgggtgagatgctgctgttctcaaccgcgatcccggcggaagttaagagaggactcggggaggccgggctgcgattcggtaccgtcttcgaggttgtcggaggtctggtcttgccgtacatcgccgagtttagcgaggaatatcacgtggtcgaaggcttggcccggatcgataaggagaaggtgcgcagtcagggggccgtgacccccgcgctgggaatcccccgaaagaaggtccgaaattacccgctggagctcgcccaggtcacactcaaggtcagggatgttctgacctacaaggcggcggccgcatacttcgcgtggatcgcgagggagttcgacgtctccgtggcgtcggcagtcagggcgatcctcgaggatagtgagtttctcgaggcccttgtcgagatcctatgtccggtgaacccgaaggcggctgaggtgctcgccgggttccgggggaggatgtggagagatgaggctaggtggttgaagttcgaggagatggcccggaaggcgcttgagctcgcggaggagctcggagataacaggctccgaaccgcggccgaactgattctgcggggcaaatcgagcggtcctacggtacccggcgctcgtggcgatcacgacggcgtctacgtctacgacatcggcaaggtccgcaatttcctcgtcgaacggatgctcaagtacggcgaaagctcgaggaagcagcctgacgaggagatcattgaggcactggtgacggagtacggagtggacttcgaggacgtacactacgcgatcgccgttctcagcgaaggtaggatccccgcagggccgctccgtaccgacgccagggtactgctggacaacgtcgccgggtttccggggaaggtggagcgtgacgtgccggcgccttggatgaggaagtcgtacggggcctggttctcggacctacgtcgcctcgtacccgtgaccgaggagaatttcaacgatgtgatgcgggctaaggggtacgggatatccctcgaggatgtcgaggaggactcggagtggtacctcgggaagaccgtgggtaaggtcctactcggagaggatgcgaaagtgccaccggaggccagggagatcacacagaccgagaacgtcaagttcgtgaacgcggcgctgaggcctagacacgcgttgagtcgagaggaggtggaagagatccgggaggtgctggggagtgtggagaccgacgttccagtaccgatagagggtatcgtggtggaaaaggcgttgacggagttcgggaagctccccatgccggaagatatctccgctgccatctcccgtggggattagagactccggtgacatcacacgaggtccctcaaaacgtttcggatattgtgacgattcgagcgtcggagggttcggatggtgaggaacgtcgggctacgtacgatcttatatcatgagcgagctagcgacagaacgggtgtgacgggccctccctggagcagcgatgtctccgaccgaagggattacgtcgcttccaccagagtggggcaggcagcaccggcagcccacgtttcgatttctgctttttcagcccctgaaactcccgttcgagtgactcgagccgacgttcgagatcctgttgtctccgcgagaggtcctcgagaccctgttccagccgattgatctcccgctcgagcgattcgacccgactctgctgtaccatcgaacccaccagctcggcgtgcagtgtcagtatctcccggtagacagtgctgagggctttccgctcttcgaggagggaccaacgggccgagctcgggtcccagtactccagaacgttctcgagaagtgcttcgttccaaacccgctccacggcacggtacaggtcctttcggatggaatcatcgatgacaccgttcacggtgaggtcccagagggcggagtctaaggcccgccaccgtgacatcgtgtccagccactcccgcacgatcttcgacttgtccgggtacaggtcgatgagctcccaccaatggtggtaatcggccgcgtgtaagatgctggagtaatcgggctccggtagtgcgacgagccccagattggttccccctgaggatatcatgttaactacctcgcgagggtcgctgagttcgaacgttaccgtgactccctggtactcgaagtcgaaggatccattcccgacctccgaaaggaagttctcgaactcctgccggacgtcggcgtccgcgagttcccatggatggatgagtacccatggggcaaggtgtacgtcgccggtgacgtttatgacaccgctatctatgaggtttctcacggcgttctggaggagctctcgaaccgtcgtcccacgatcctcggccgcttgcaccaggtccgagacgtagctcaaggcgggtatgtagtacagtcggtccccacggacgttgaaataccccactagcatatgtctggctatgggatccagtcggtcccatgttggatcgtaatcgggattgatcgccgtgatgtcggtgccacagactatcacccgcaccccgagtttatcgcaggcgtacagggtgttggcgtcgaacacccacgaagggacggataggacctgggcgacgttgctccccactcggtccctgaggaattgcaggttgaactcgagctcccagtactgaaggctgaggggaagaccccctaaggcgtgggatgtcgagtgtagtccgaccagactgatcgtgccccgctcggcgtactctcggatcaagtccgtgatacccggcgccgtctcctcacagacgttgtagtggaatactgcgactttgatgccacgctcttcgcaccatgagaggaactccttcagtgcggcgacgtggtcctgggaccacgcgtcactatcgaggtaggggactacgtgcacgtatacggtcgcggcggaagccgaaggtggcagcggcaggataccaatcaacaccaacgaaagtagcaccgccggacccccggtgcatatcccgggcttggagttagcatatgtggtctaaagttgggttctatgtagattttgtggggttataggttctgtgatgtttccccaaaccgcacaactcaccgttcgagtttaaaaagtatggaggcgttgggggatcgcggcggcctcttcacgccctacgtgacgggaggcccggaccacgcgaggtttcacccacacctgcgtacgcacgacaccagcgcaggcagcaggaaagccggtcgaaacctccgatcccagtcgtgtgcggcccagtcagtgtactcgtagtaagtcgtaccctcgatccagcgtacgctcacgatcgactcgcgggcggtttcgaaggggatttcgaggacgacggggcccctgtaccggcggatccggacgcacccaccgaggagtacgtgcgcgccctcgggtagggggccgccctccaggaaggtcgagccctcggttaccggaattccctccggatcgggtaccaacaggagtacttccgcggacttcgggcactgaacgtggaggagccctccgctccaccgaactcgaacatcgtcgagccgtcggagggatccgaagcgggtactggtttcctccatcgtctcccgccaacgatcaccctcgcggacgaacactgccccctcatccagttcgggcgtggtgaggacgaccctcgtgacgtcccactgggtgccgacgaccgtgtgcacgtctggggtgaggtacatcgagccaccgtcgacgagtcctgcgaccggagagagtacggtcaggaggaatgtgagtagttcgtgcaattcgacccttcccttcaccggattccaggagttggtggatcgggatcgtacccaccgggctttctcacgcgctctcgacggttcacacgggttcctggcggtcgaattcggaacgcgttcgtcgacatccatcggcatcggatctcgggaacgtccctcgagaccggtcgtaacggcagctcggagatcgaggatgacaacgggttcgaccctcgggacgtgcgggttaccgtgggtgtaaccggtgggatctacgtctgcgatgcgaaggacggtccgacagtccgcatgccctgtccgaaaggttacgatccttgtaacatttcctggaaagaagtcagggcgagagtcctttgcggcatagtaacaggccggtcgtggccgctagcaccgccaggatcggtagcagcggtggtgttccggtggagtgctccccgacgcacacgccggaggttcccgtccttaccggccttccggtagctccgccgaccgaactcccggccgatacacgcgtcgttggacctcccttgaccgcggcgaagtgggcctcgatggtctcggagggtgtcgactcggtgattgtcgtgattgtcggcgtctcttcaccgccggagggtgattcgatgacctcctgttgggtttcccgttgagcctcggacgtttcctgcggggacccagggttcaccgactgaaccgtcgatcctgtgggtccgggtgagaaggtcccctccgcgtgcgaggtcaggtactgggtcgtcaggtacgcgatcagcggcagtgccagcacggccgtcggtagtaacttcggcagtagttcggtcagcgacgatcccgactcagtgggccacagcgcatcccagatcttgagctgagcgtcccatgagaagtaccttgtccactcgacgttggagtccaggatccgtaccgctcggcggacagtggtcggcgttatcctgacgtacttgacccactccggctcgcacactcccgtcgccaggacctgctcgatcttgtccggcttcaccgcgatcgcgagcttggacgatagtccctcccaggtgggcaccacgagggactccgggccgttccatcccggcacggccgatccgggactcaggcagtatccgatggtgtcgacgggtcgcgtgaccgtcagcgtgtcgccctctactcggacaccgtccttcgggagcggtaccagcagtggctgctcctcgtaggtctcgccgctcgatttcgcgtccccctcggtgatcatcactacgtacacggcgtgctcacccacgaccaccggatgttctttcaggtccagcgtcgcaccttcctctgccacgacgtggaccctgaggttctcgagcatctcctcgggagtagcgccgttggtggtcgctttgcccgtgatggcgcttgccgagttcgcgaccatcgcaactgctactatcgccatcacgaggactcgcattccgggttttcaccccctccgtcgccgtccggctcgacgcctccatcgggtcgaaagaagtcggagacgtgaaggagaagcgttagcggcgacgacggcgtacgatcgggatcaccggtaagatcggagcgtgaccggtaccctcccgtaagtgcggcttctccgcgccgcccaagatcacgaatttcttgggaaacagccgcccccgctcgtccacggtcaggtacaccttcctaccgttctgcaacgtgacctcgagggtggtcggggtcacacggttcacggacttgacattgagggggagcttcacggtacggacggtcccgtcctcggtagtcactcggagggttccgtcctcgaacacgtcgatcaggaacgacctcccggccgtggtcagttctacggtggctatccgggcttccatttcggccgacgtcggtcggccccgctgtagggcgctttgtgtttcctccaaccgttcccgttcctcgcttctccctccggtccttcctccgctccccttctcctccaccacgttctcctcagctctcccctggagcttctcgggcgggaatacccggtcagacgatgatgactcggtagtgggttgggtcgtcggtctaccctcacgctgctcctggagccggttcgccgaccggatcgtctgaccccgctgctcctcggtagcggatcgcgcgccggactgggtatggaattcgccctcggtcctaccctccgcgctcgactgcggggagtggggttgataccgtgggagcttgacggtcacgtccgtcccggcggtcgcgctgaacgacgtgccggtgtccgcatcccgacagtgtacggtcacgagaaccctgtacgtgccctctcggcccacctcgaacgttaccgacccgctcggatccgcgagtgttttcctgcctaccacgttaccactctcgtcgcagaggaagatttccacactgtcaacctcggcgcggtcgacgttcacgcggtactcgacactcagcgtcgcgctttccggcgtgggtcgtgcgtccacgtccaccctgacactcggtaagacaactgctaccgcatcggtggttagcttcgacacaacggattccgtcaccgagtctattgaacactgtagtgtcatgacggcgtagtacgagccacttctagttaccgtgaacgttactgaacccgtcttaggcggattattgacgactttccgatccatgagattgccgttctcatcgtagagtgctatctcaagtagctccggagtgcaagctgttgtatttatctcgtagtaggcactcagtaccgcgttcttaggcgtcttcttaacaagagataacgcaccgttcacactcgcccgcggtatctgaacggtcacgccggtttcggtagtggtgctgaactgtgtaccggtgtcggcgtcccggcaacgtgcggttataaggaccttatacgtaccgtctttatccacatcgaacgttaccgagccgctcaggtccgagacttccttcttccctaccacatagccatcctcgtcgtacaggaccacctcgacaccgtccacctcagcgtgactggcgtcaacgtcgtaatccaccctcaacgtcgcgccttccggtccgggttgcacgtccgtgcttgcccgtatacgaacgctcggcagtacgatctccatcacatcggtgctcagctccgaggccacggattcggtcgtcagaccgctcgagcactgcagtactaggacggcgcggtacgagccacttcccgtcaccttgaacctcaccgagccggtctcgggcggatcctcgatcgtctcctggctcacgatctcaccactctgatcgtagagggtgatcacgagccgttccggagtgcaggctaccgtgtgcgtctcgtaccggacctccagtgtggcgccttccggagtcttctcgattagggatagcgtgccgctgacactcgctcgcggtaccggatcggaaggctcaggtcgatctggaattggtcccatagtcgtccctgcacgtttccactcaacacaacgtacacggtgtccgctcgtcggtccttcgggaggctgatcgtgacaccgctcgcgagctcgtccagcgtgaacgggacctccgcgatcacatccccattctcgtcctcgacgacgatcctcccgccggtgatatcgctcaacccgacggaggtgaactcacctctcaccacgagatccgtcgggtcggcgcggtccagcgtcactttcccacgtacgaccccgggggatggacaccaccagttccggtccaggaacacggcggctatcccaccgtcggagtactggaacaccaggaccctgtggttatcatccgccgaagtcgtgaggagcgaagccgaaccgtcgaggtagtcgcgtagcagctccagttcggccttccagacctccaggtactggatgatcccctcgctctcgcacatgcagctcagctgagcctcgttgacggtcctgagcacgacgtcacggaccagcgggtccagctcggttctcttcagcctttgcagccgcggagcgatcgacttcagtacgtccataccttcccgccatagtttcacgatctccgggtattttttctccaactcctccaccgtgcgcagatcactcgcgtgcaccatgctagtccagtctaagtcgctgatcgtgacatcgggatgcccgtaggcgtccgggttttccgcgatttcacgcactagctcgaggcactcggaaggtctttccagctcgaaatgcactgggattacgccgtacaaggtgaagtcgaggctcccgctcttaacccatctgatgaactcctcgatcagatcgaggccggtcctgcccgtgcttcccatctcctcgaccagctgccacgggtggatcagtacccacagtacgaggtccgcttttccgtcgttgttccctttgatcgcgcccacgttgagcaacgtctcaacggcccgtcggaacgcccccttaaggctctcgaggccgtaggggcctatgtcctgctcaacgtcgtccacgagctctccgaaatcgatcaccgggcagacgtacaccacgtctccatcgatgtccaacttcttgacgatgagcacgtccgcgaggtagtccatatcttcgccctgccacgagactactttctccgggttgaactcccaagtccggtacccggaaacgatccacttgatcccgagttcgcggcagacgtgcacgaagttctcgtcgatgacccactcgatggacggtgagaccacgtccttacggaggcccggctctaggttctgttctttgaagaactcccacgagtactcgatctgcaatcgctcgatctctggtgggagtccggcaatagagtgagcggtaccgtgggatccgacgaattcgacggatttgcccaggtgttcccggattacggccgtgatcccgggcgcttcgaactcacattccggatagtgaaacaccgccaccttcacgccgttctcctcacaccaagtcaggaaatcctcgtaagccttgacttgatcctcactgtacgcgtcgctatcgttgtacaccgtaatatgaactgtaattgactgaggtaaggtcattgttaacaaagctgcatgagttggagctgctaatgttaacaggagagccacaagaacgacaatggaagatcgcgtcatcgtctcggttcccctaagttggtgtttggtaacaatatcacgatgtcgcgttgtatgtcgttgtccatgacctcaaatgctcgtagttggtaataaactttccccaaagtacccgcgccactgtgctggaagtagatctgcaacggtcgcgtgccacgacgcgtacgacggtctctcgggggcgtcggtctcggtatcttcacatccttcgtgcatccacatcccgacagacgtgtaatttaagtgttggtagagcctcgcagtgtaggaacgtggtttatgggatgagactcttcgaggggcctctggagggtctccggatgatttccccgtaagtcgtagcaagttcacgacctgagtccgaagaaggcactcagggagtaggtgaggagatcgacgagcagaccggcggtcgtcgtccacttgtatgggctcccgttcaccagcgcgtggtaaaggacggccgggatcgtcggggcggacgcggtcacggtgtggaacgtgaggcgccacatgaggtcgtggagggcctccggccggagttcatcccaaccgatggcctcgatcagtccgtacagggcgcccgccatccacgggggtagtccggccatctccgcggtcagacgcttggtggcctccctcgaggactggagcttggacgacgtctctcacggcttcttcgaatcctgacggtaggaacgcgcggagtcgggagagcgagaggaccacgctccggagtgcgtccacgacgtcgtaagcgagtaccgtcagcccgtacaggaacagcccgtagatgactcgaaacaggcacccgggaagtgtcttggcggccccgcatctcggcagatatcgggacccacgagccatactaaccctaacgaggttcctgcgatcgttccggccgcgagaaggtaacctcccaacaacagttccggatgcaagacgactcgcatgggtaccgccgcgacgatcccggagcgctcgaggatatggcgtacggccggatccgaggcgcgcttcacgaggttccagtaatcccaagacgtcgcccaatagtcacccgacagtaccttaccgacgagtttcagggaggtgatcaccgccgggtcggcacccagttcctcgaggagcggcggtagccgtgggagggaatcacccacgatcgtgaatgtgagttcgccgctgttcagatcgtacgcgcagacgattccgtgatcgtcatccgtcggtgacccgcctacgggtccggccagtcggcaggtgcccgctcgcagatcgcaaagcaggagataacgctcgacgggagcccggctcttcccctgggagacctcgaccgtccgcgcctcggtgacctccagcgtgagcccgagtacaccgtcacggagttccgcgctcgtgcatcggacgctgtaagccgcccggatgaacggtgcgaggacgcggtccacgggtaacgttcggggttcgtacacggtgatctcggagtacccgacgtcgaactcgaccccgttacgaaggaccctcatcgcgtaccgttccacgatcggggcgtctcccatggtcagtcggaagctccctagtaggtagatccgaccgcggtacgtcaccgcgatagggaaacccacgtagtgccggttcccgactcggtacgcggccatatccgggctgccgagctccagcaggcacgagtcggcgggaacctccaccgtggatccgtccggcagggaaaccgcgatccgcccgcccgtcaccgagacgacgacgtgttcacggtactcgatcaggactgcccggtgggtacacgaacacaccgctcacagatgccacctcacccggggcgaacgccgcgttcagttctcggaccgctccctccgtggcccgtaggtcgtgaacccggcttatcagcttcccaacgagctcaggttcctccgagaattccacgatcgccccgctcgccggtccgatcatgatcaagagcgcgaggacgatggggatcggcggcacatcgtcagcccctcggtggtcaccagcgtgcgacgataagggtgttgacagacgggttcctgtgagttaaccgcgtggatggtggtacggcctcggcccgggtctgcgacgggtaaggctctccggcgcgtcttcctgctcgtataatatcataatatgaatacagagagcatagaaaatgagggtatgaagtcggagccggcccgagactcagggtttgagcgacgagatcctgatctcatcccctcccggtatctgcatagcagtctcgagataccaatccacgagctcggccgcaatgtccacgtcttcgggctcgacatcgtcggagagacgcatgcgagcgtgagccttcgcgagtctttctacggactcgagctgtctcctagtcacggggagcgtcgggagacccatcccgaggcgctcctcgacttcctcgcgtcgggtctcgtaccagtgctctaagcgcttcctcgcttcctctgtgagctcgggcttcggatgctcgcggatcgcgtagaggagatacctccggagcagcgtgtagctcggtacttcggtgtcttgctcctccggctccccgggtcgtggatcgaccccgaggaaggcgatgaggtcgaagtgggagaggaagtcctggtccaggtcgatccgggcgatcggaggatcactcggccactgctcaccagggttgatggcggctaggacggcgcatcgggcgttcagcgcgatcccgtcgacggttaccgtacccttgtccatggcctccatgagggcccaccgatggggctccggggccccttcgaggtggtccaccgctaggataccgccgtccgcgagcacggccgcaccggctctaagggcccaacccctgtcctccttcaggaccgcggtcaggtccgtgagctccgtgcgtcggaggtctacgtacacaccccggggtgcgaggtgatccagaacgtggtgtaggatctcggagcacacgaccgggtaacccgcgagcagtacgtgcagacgctcgctgttctttccgacgcatgagaagagctggagggcgagcatcttaccgacttcctcggcccctggaagcggggcgatcgcacgggcgaacgtcgttagcgggtctttatccgcgagctcgcggaactcctccagctccgcggggtcggggtgtacctccgggatggggtccttcttgtgaacttccagcgcgtccaacgtcgccgatcgaactatcccgaggatctcgacccggagtccgggtccgaggcggtggccgtggagccgcacggccaccagctccgagcccgtgtcgacgatcgcatgttccaacctctcggcacctcggacctcgcggactaccccctcgatcgagatgagggctccgtccatgggccgtattctctctaccctccggaaccgatgggggagacctcggaacctcacgcgtggttcgacatccggggccaccgttctgacgagctcgcggagcgccggttcgaccagcctggcatgggtcgcaatccaggatgctagatcggagtccagctcgcggaggtctaacactaccggcttaccggaggtgacgcgcctcagcgagcgctggaacgactcggttcgaactatttcgattagaacccgggtagggaggccgaacctactcgcgacttccccaatcctagcgtccggatcataggtcgtggctcggggtgtggtgcccaatcggaacacaccctcagaacgtcctcgggattgcgcccacgtatccgacacacgttagccgtatacgctttccgatccccggtattcccattctcacagctaacagcacgttcagtgtaactcaccggaatcacctgtgatccggttccatcgtgggccgttatgagtttctcgtccgttaacatccgccggtgtccatcgtacgttgtcgaacgatttcggaccgtcacattgttttcattcggtgagctcagacatcgttccggacgcgaaccttgaagggctccgaaactcaggctttgacctcacgggcggtggtcggcccccggtcggttcgacccgttcaccgctaacgtgacgttcccgtactcctgtgaccactgttcgggatgaggggtgaaaccacacacgggcccgagacagtcagatgatgagtccacgctactacagggtcgctaccgggagaacacgtcggtcaacggtagcgtcggtgggcgtcgtgccctgggttgatggccgccgttacgcgcggttccggcacgcttcacggatcgttccggacgactccgacgggacacgtcggctccagggtgttcactgagggacgttcggatggtttctggggggaaatcaaccctgaacatgacacggaaacggcccgatcagtgcctttactgtttagaaattcggagatggtgtgcccaaggctccacggtggattctacccgctgtaaatccgagtaacaacttctccacactctccacacgggacgtcgctagggccggacgggtgcgtcagcatggggctaggctcgtcatcggtccgcgcccaccgctgtcatcacccgtcgtattccctgaagtaagacatgaggtagatcgcccttaaaaagggagtcgggatgtgctatatttccggagcgtccacaccgcccgtgcgatcgtgcgtatgtgaagcgccggttcatcggcggtacggcggtcgataatgacgacgcgcggtgaacccccgggtttttcattaagttaacacccgggctccgtacgccgcccgggaggagcgcgttccggtacggtacggcggtggtctctacggagaatcggtaaggcgatggtggccgcgtgttgctccgtgggggatggcggttcttgaggttgaacgcgttcgtagtgtacgcacgtccgaagggaccttcactcaccgtggactccggcgtgctggagagactaggggcgggatgtcgagaagtcgaggtcggcagtcgtctggatctaccgctgaaactcgtcgaggacggactcgtggaacccggacgggttaccatctacgtaccgaccacttggggatcgagagcccccgctcgggctctgagtgtggtgaaacgtatggagactgtcgggtacgaggtgcacgtgctggtgggcaccgaagggggctcgggaaggcttcccgaaggattcccgggggaagttcgggtcgagaacgttaagcgagatctttcgggtattctgaagctctctgacgatattttcggactcttctggtcggaaggttcgctcctcctggatctcgggtgggctcgcgatccggggccacgatccgacctcgcgatactcaccgtttccacgctggtggcgctgaaggtcgtcgaaaacacctccggggagaggccgctcgagcgaacggtgatgatgatggaggtcgatcgtaggctcgtggacgcctcggagctcttacacgcgctcatggtggcgctggacctcgcgtacttcccgatcgctccggatctgggtcgcacggttcgagaaggtatcgaggagctcctggaaggactcgaaggatcggaacgtgaggagctgaggaaagccgcggacgccttcgagaggctctccgggagcgttctcgatgcgttcgagctcggaagggtcgagataccggatcgtccgggcatcctccgggagttgctggagtaccggctgcggggtctctccccggcgatgatcgatggagagttccccaggagggctaagaggatgttgaagaaggtcaggagaaggctcaagcggggggacgggcgcccggacgacacctcctccgagcgtccgaagcgcccgaagatctgacggggatccgcgatcgaccgtccgaggtacgtcgtcgttctcggcccggcggtcaccggggatcacgccgctcttccggcgagtcacgggccatgctagttcttcccgcgtgggacgatatgttaagccatcgtatcgggaacaaactctttagggaaagttaatctcggcagcggatcgccggtcactatcgaagggtaccgtcaccgaccgccgggggtggcgcgggtgaaggtcaccgtgtacgggtgcggggacgagaacatgatggtgaagctgatcgaaccacttggaggtgcactacgaactacccctgggtggggcacacctggcgtatcgggcggcggaggccggacatgacgtagtcctgtgcgacccctcgttcgacatctccgaggagtcgatggagcggttggagtcggccggtgtggaactcgtgacggacgataccgcaggtgtggagcacggtgagatccagatactgttcacgccgttcggtcatacggtgaagatcgcccgagagttgctcgacgacgtccgtgagggggccgttctctgcacgacgtgcacgtgcccaccgatcgccctgtaccacggcctggagggggagcttcgcacgaaaagggaggacgtcggtgtctcctccttccacccggccgggatcccgggggcggagacacaggacctgatcctggtggcggacgcgcggtccgaggagtcggggatcgagctggcgtcggaggaacaggtcgagcggtgcgtaaacctcgcggaggacatggggtacgacgtttacgtcctggatcccgagcttatctcatccatcggtgacatgtccgtcgtccttaccgtgcgtatagtccaggcgatctgtaactacttctcggtagcgaggatctgcggtgcacccatcgagatgatcgaggaacaggtggaagaggtgctgtcgaccatggcgtacctagtcgggaggtacgggctggacgcgttcgatcggatggatgggaagctgctgctgaggtcgctgcggaacatggcgctcacggaggacgtcgagcgggtcgtggacttcttcgagcggtgctacgtggacttgctgagcggtgaccgggagagcatgcgagaactgagctccatgatggtgcctccggacaagctggtggaccgcgtccgggagatcgtgggagaggcgccggtccagtacgcccggcggaggttcttcgaggagcggcgatggggctcgtgaaccgccctttcctcgggtcgccatccacgatccggtgccggtcgccctttcgggggatccgaacggtgagggaaaaacggtcgtgggttaggaaacgcatcaatatggttttaatcatcccgaatggtgtttcctttctttaatcctagtatcttcatcgcggtctccggacggtccgtaggtcgtgggttggacccgacgagaccgccgcacgatccgactacgcgcatctcgggccccgaccccacctccatcgaagccggagcggagtaggaagggggtccgcccgggcgtcgagggcggactaaggcccctgaacccgccgcagcgcttcttcctccaaccgtcggatgttgcgctcagccctccgtacgcccagataatggcagtagactccggctccccaaccgagcaccggccagatcacccagatgacccgcggtgtcagggtcaggttcatcaccaccatggccacgcagccgatcaagtagatagtcaagtgcgcgcggaaccctttgagtgcctcttcgtagtacagctcacggaacgtctcgcggtactcgtcgagctcggatgtttcggaggacaccgtagccccccgaaaccgccgcgtcgatcctgataaggcccccggctctgggccgaccgaacacgacttacggtactcaaaagcctctccttttcaagccggaggacggtgcggagggacacccaccgagcgggtcgaagacgtgtggagtccgggccgatcccgaggacgtgatccgaaccggtcgtcccggaccctcgtccttcatgttatctccgtcaagttacgttacggaccgcccggaactcgggattggcacccccgacggcccgccgggatcgaccgggcgcgtccccgtaactttttcgtgctctaaagtcgtggtcggccgtaccggttactacgggggttacggcaccgagttgaggatgatcgcgatctacgacttagggtggttctcccgggccctgctcgcggatgcgacggtcgcggtgatcggcctgacgatcgtcgcgacactcatcgcttacctcgggctaggtggaccgctccgaccgtcgctcgccgtcggggcggccgccggggcccttgggctcgtgatctactggtacggcacgctcctggcctcttcatgccggatacgcggcgtcggccgcacggactggggcgtggtcgtgggagtgaagtgccggacatcgtccgtggccgtggtcgggatcttgggagagggtgaaatcggtgtcgagaggggccggatcgtgaagcgtgagacccagtacggtctctgcctgtacaagctcgtgttgccccgcggtgagggcctcctctgggtgtacggtcaacccgaggggctggtggtggccaccgtcgggaacggggtcgcggtgttctccgacgaccttccccgggtcctctacttgggtgtgatcgccaccggtagcctgctggagtggttcctggacgtcgtcatgccgttctcgaccctggccgacctcgcgatggaaccggcctggaggatcgtgagggagtcgagctcgatcagctgcgccccgtcgtgggacaggctcgcgcgggaggtcgcggtggatccggggatgacggcccgcgccctcgagggtagggtcgcactggtccaccgcgacgtcgcgctgttcttcctctcggtgctcatcgtcgtactgggagtacccgtggcgctgtcggtgttgtcgggatacggcccggtcctatacgagctgatcgagccgttggtggccgtcctgcaaggcgtctgcgggggaacgttccccgtcctgatctgcacgctcctcgccgcgctgctcgtgggttacgcggtcctcctactgacgtccccgctgctcctgacgtacgtcgggttcgtgacccggctgaccgcggaccgtcacgcgtgatcttcaggccaccaggagcttcagcagcctccccatggtactgccgggcctcttgaggagcgccgtcggggggacggcggccttccccagtcgatcgtggtcgggcgaggtgatgtacacctcctccacgtcggtgcgtgagaacaactctgtcagcctgttccgctcgcgctccgggtctatcccgtactcgaacacgtacacccagtccccgagcctctccagcgctctcagcttcgcctcgaagacgttcccgggcgtgggcctcccctcctcgtccgcgaccacgttctcgacgaccaccccgaacccgtagcggtccttgagctcggcgagcctccggtcgaagacggcgtcccggcgttcacgtagactctcaggccgaggtctcgcgccgtccggaggagctcctccagcgcccggtaggaccgacccttcagctcgtcgacgtccccgccggtttcacggtggaaccactcgacgtaccagtcccgcgaccagggatccacgacgtcgatgaacacgccctcgtagccgaggtcccgtaactccttgagcttagcgcggagggcgtcgagccaggcgcgctcccagaaccggacggcgtggtcacctggccactccggatcggggcgtcccaggagccttttgctccgcgtcagacggtacaggtccctctggtgctcgccgaccgtggcgagcgataggtacgcgacgggctttacgccgtgctcacgcagggtccggagctcgtcctcggtccagggccggtcaccgggaccgcagtagggatcgacgacgagcgtgcgcggacgcttctcgaggatcacccgaaggttgacgtcctgccagtacgtcgcgagcggcacgccgtgatcgatcactgtaaaggccaagaagatcgtcaggagcggcttcagcgaggtgcattcccccggcggttccgtgtggacgggttcgaagctgtgtgcgggtccgacggacacccgttagtacccggtcacacggcatgccctcgggcggacgccgccacgttttcatccacattaacttaaccccggcccgggaatccggtgggcgcgggaggggccgatacgaagagcctccgatcacggaggaggagttgaaggacgttgaggagtagttggaatgggcccgcaggctggtccgagtcgttgaactggtagtggagcgggagggctagctcagctcttcgacgaccttgagcaccttctccgcgtccctgacgttgctctcggcgatcccgcggtgggcctcgatctccccgaggcggacgtcctcccggcgtgcgacgcgaagtatgcactccctgagctcctcgggtacgtccgacgccttctctatccccttcaggatcttcacgacgtccgcgtgcggtccacccgttagcctgcccttgaggtaagccaggtagatcaaggcctggcggacggattcggccgataggagcagcttgagccgcgcgccgtccagcctatcggccagatccaaggcctccttggccagtctcaggacccgaatggcgcgggtcatcgagactcccgtgaacctcgttaacctcgacgttaccgtccttgacgatcgcgtacacgtccatacacggtctgcgtagggactcgaactcggggtcgccggggagacgttcaccgggtcctcccaggagaggccgcccctctccagggtctcctcgacgagttcctccaccctgcggctcggtacctcgtcgctcactacgacggcaggcccagcgccggcaaagctatcttaccgatgcagaggttgatggtttcgctgaatcactttcaaaatctggacggaaggaagtaatgcccgaacggatcgactcgctcccactaggaagcctccttccagtcgttatcccatatcccagtcctcagactctcctccaaccttgccgcacggatccgtccagctaggtcgcattccacgaaatcttcagcccactccaacatttcctggatctggctaatgattcgatcaagttgcacccgctgcagcccgtaccggttgacgtcaaccaggaacgccatccgtatctcgtcatccccgtcgcgcacgtagttggccgtttggaccctgcgcttgtccactatctcatgccgtcttgagagtatgcacaccaggtgctcgcccaccttatccgctggtactccagcaaagtcgccgataatcactgggtggcgcttcagccggcccatgaacgactgtagctgcttcttagcgttaaacagcagcctcctcactggttccacctccgacctgtagtccggcagcaccgtgacgtgcagcgcgtacggaacttcctcacccagccgaatcgccgtggccgcaccgatcgctccacccagtccccagaccagcaccggcacccgatcggctcggtactccagcttcaccacttcgacaaacttctcagacagctgcttcagcgcctcgcttttctctgcatccttcatcgccgtctcgtagtcacggtgggcaccgctaggacttccgtaggccacctcgactcggctggtttgaaggcccagcttctttgctagctcctcaccgctctggatgccgtcgggcgtgtcgaccaacactacgctggaagcttcaaacgctgaagccacgtacggggccacccgacacccgaacgtcccagcaccgaccacgatcaaccttcgccgctccccagataactccccaaggtggagaacgcgcgtcgttactcgccgtcgtcaacgtgtacgattaagcgtgaataaactttggtcagtttactagcgccggcataccagctctggttaatgtaggtaacgtacttagggttgacatcgacgagttccgaacccatccaacacagtatatgctgtcagtatgagttcgctctaacctcaaatgatcgtattgccatcgttcgacaatagcactgaactgtatatgaatagtactacatcgatgtaggtgttaatcaacattgttcatcggagtactcctcgcaccgaccgtgaacttgcttctgctcataagtttggttaagctacttcatgtcaagtgctcgcttcaaggagcggagctgatcgcccggatagctccgatgatgacgctgggggtagtccccgcggtcaccgtcgaggcgcgtagtctgctcaccaggataccaccgacggcgaccgtagaaaggatcctgaccgtcctcaacgtgccagctgtgttcgtgtacgccttctccttcttcatccttgtccactgctacctatcgtgaaaccgcgctgcggcggtccttgaccggttcgatcggtcgggccgtgggatactaccctgttccggtacggtcccctcacagcgttcggcgtgccgagggtacgaggaccgtgcgggatcatcgagggcgtcggagcagcgggaggacgctcgccagtgggatcgcaccggagatgtagaacacggcgctgagcgagacgtccgccagcagcccgggcagggacccggtgagcctcccgagggacatgatcgagccccaccatcccatcccgaggccgcgtctctccccggagacctccgccaccagcttgagcgatgacggttgggccagcgagtacccgacccctcccacgcacagcaggaccacggcgacgggtacgctctccacgaagggcagcaccagcacgcccagggcggcgagcacgcaccccagcgcggccaggacggtcgggctgtaccggtcggccagccacccgcacggcgcctgcagggtcaccgccacggcgttgcggatcgcgagtaccagtccgatctgtgccgggtccgcgccgagcttcttcagcagcagcgggacgaacgactcgatcgttggttgcacggccgcggtggcgaacgcggggagcgaggcccggaagagctcccggtcgacctctagcgatctcttcaacacctcgaggggtgagaccttctcccgggacgtccggacgtccgggagcgatcccgccagcggtacggcgagcagtgccggtaacgcgaggacggcgaaggcccagggtccgacgctccggtagaggtagccccccaggggcggagccaggaccatcggaagctgggtgaccgcgttgaagacgcccagggagcgaccgctgtccgcgacggtggacaggagcggcggccagagcgcgcccataccgagacccagggaaactcggctggccagcagcgtcccggggtgcgggacgagaaccagcaggtcggacagcgcgtaccctagggccccgagcggcgcgagcctcctgggaccgtacgcgtccgtcagggcccctccgacgggcctggctaggagctgcgtcacgttgtgtacgaggttcatgacgccgacgaacgagcgggggtagcccgcgtccaccacgtagagcgggaggatcggcaggactgatgtcagggacaccgcgcacgcgatgcccacgacgtgtgcgatcaacggcctcacccgtgttacgcggtggatcccggacgccgcggatggtctccggtcgtgcgggactcccggttgaatatttttgttgaatacttttaattcagttcacacgatggtcaccggacgagggatgatcgcggtcggacggtagacggttcggggacaccgatcacccggagctccgggtggtcgaggtgatcaccgtagaggccgctcacggctgcggtcatcggacggtgtaccaccggtgtgcggatggttcaacggggacccttcgagggtcaccggtggcctcgtcgtggccctcagacgccgcccgtgggccggtccgtcggcgatggaatcgaaactgtaatgcctccatttctcggcagaaaacacgggagcgggttttcggtaagtaaatatcgatccctggccttctagaccttgataatgtcagaaacttttaagtatcatgaactcgctacacacctgtggcaacctcgggagctaggtgaggccgactcactcgcccgtggcataatcgttataattatcgtaacgtttctgccaggactcggtggaagcgacggccgatggggtccgcggggtcggcaatggacggtccgatcatcgggatctcaccgctcacccgtctcctcatcccgtgcgcgcctgtgggcgcctcacgggaaccttccacaccggttccggtcgaccctcggtttccggcggcagcaccgtcctccggtacttcgcacgttctccccgtcaatcctaggcccggtgaaggctcggtggctccggcgtctcgaaacgcacaactgccttgtcgtcactccaaccgattcgggggagacctttgaggcttccggcgatcgcggccggactgctgatactcttcgcccagccggcgagctgcctgaaggtggcggtgttcgccgccgatgacgtggaacccacgtgcctcaaggccatcgagaaggtactccgggacgcgggcgtaccattcgacgaggtcaaagggaaggacatcgtcgacgggacaatcgtcgagaggtacgacgtcctgatcctgcccggtggcgcgtactccgagcgcgtcgtgcatcatcccaggttcatcgaggggctgaaggagttcgcgagggcgggcggcaagatcgtggggatctgcgcgggtgcgatcacgctggtcaagggtgggctggtcagggcgaaggtggagggagcgggtctcggcgtgggtaaggtgacgctggagctcgagcgcgatcccctcacggaggggctgcccgaccgcctcgaggtcacgtacatcaacgggcccgtgatgcgctcccaaggggctaaggtggtggcccggtacgcgggaggtatcgtgagtcgcggggacgcgatcctcgtggaccgctacggtaagggcgaggtgatcgcgatcggaccgcacccgtgtcacgacgagagggggaacgtgaacacccagggcgccaagctgctgctcaacgccctgggcgtgaagaagcgggtcaaatccgggaaggtcgagggtgagggttggttcccgacaccggttccggtagcggcggtgatcctgggactggtggcggcgctcggggtccgcgggctgatttcccgacgtggtaccggggtgaagtaaaagcaccagaaccgtgagcttccggtccggggcccgggtcgtcccggcgggtcgggagagcggggcggacccccgcccgatgacggcccgtcgtttccgcccgggcacacccgttctcctccccgtgatccggttcttcgggcgcgtgatcgtcactccgttctgtttcacggtagggagggaacccgtcccgtgtcgtgtagtggtgtcctacggtcgcggggccggtccggtggatttccgtgagcttaaggttgagtccgttaacttcccgatgtgtccggtgtcactcccgttggcggtgggcttcggtgtgcgagttctcggggagcgatcggtgtaccgccgatcggggcgccattcctaagtctcagtaaggttccctacgggctccggcaccgtcggtggctccagtggggttatgtgggttcgaaagtcatcccattagccgctgttttgaatttgttttgaaacctttactttcagttgtatgcagtcgtgaaatttcagctaatgatactttcctaagcccgtgctgaacccccgggcgattagcttatttatcgaaacgatgaacggtcaggcggggtagacgtgagcacggagatccaggaggtctgctgcagactggaagggtaccgtcggaagctggagcgagtcatacgactcctcgagggggatccggacggtaagatcgccgcgacgcgatcgccctgctcgtggcggtcgtggaggagctcaaaagggcgcgtgcgttggtcgagaggaatctcgagagctgtgaggacccgagttccctcgaaaccgcttacaccgtggtcgccggcatgcaggtgtgcgcggtggtccgtcaggtgttccacctggtgaggaccctggagcgactcgtgggtagggagcgtgtctgggagctcgttggaggacggacgatccgggacctcgaggagctcgagcacctcctaccgccgctgtaccggcccgaggtggacgtcctgcatctctcgcagggtgaagggggtcgccgtagcgtcgaaccggtcctgtgaggccgtggacggaatcgagtccggatcgagagggcgccacgtcgccggggagctagatccttcgtagagtgctatctgccaggtagttccacccttcacgcttttcggcacgggaaacgatgtatcgagagcgcggacgttatcggaacgtcctcgggggaacgcgcttgcgcccggcgccccctcccggtcccgctccttctggtgccaccccaaccacggtcgttttcgggttaaacagaaacgagtagacgacaaaaagggcaggttatgttttgtatctcaacggaagatggtcgtaacgcggtttacggacggtaaatcacggtcactgggcttttggccccgagtattgccagaaattattgccaggaatttttaagtatgatgaactcgctgtcccattgatggaacgcgatgcgagggtcgggtgggagcccgtgatccggaaccgccaattgttatggtgttcgtaacaattagggttcccggaagaaccaacggacgggacatctgacgtacgggcgacgctggacgcggtgcgatcagacgtgctcgcgtagttatccagaggtggtggaatgggtaccggcggtggcgatgctcatccaagaggtgccggacgtagtgatcgtttcacccgacgactcgaggctggagaacctccgctccggtgatcttgttcggatctcagctgagtcctacgccggcgcgtcgggggaagaaccgacacggtactgggaagatccggtacggcagtattctaccgtcgaaactgtccgtctcgaggttttattccctggagaccacgatctcgcagccccgctctcccagcctctggtactccgtgaccacaccgccgaagacgtcctccaggaggccgatcaccacgcacacgacgtccttcacgtcaccctcgagcagctcccggacggcgcagaacgggcacgcccggatgcgcacgatcacccggtcgttctcctcctcgatctccacgtcctccccgaacatcaggcgcagctgttcctcgagagtctcgtaacccagggttcggagctcccgcgccaacgtcctagaaaagcatcggatgaaggcgttacgacccggtccgaggacgatccaggaggcctcttccagggcggcgatgctcgtcgatcaccggcggtcactcgacgaggtcccggagcctgtcctcgagcacctctcggattatgctcgggtgttccggtatcttgacgtcctcctcggtctgtcccggggtgaggttggagaggagctcgaaggcccgcgccgcctcggtgaggtcctcccgctccggtccgtcgaaaccgtccaggagcctctccaactccctcctcaccgtgggccccagggcgggggccaccgggtaccgcgccaggtcgagcacgaccgagagcgcgcgtaggacgtccgtgacgtccacgagcttgagacccccgccccccgatcccctcaccttcccacggtccacggttagaccgtgacccagcctcgcgaccgccaccacgcgctcgaacgcgtcctcgcccgagacgctctccaccgccctcagggccgccaacgtcgggaccgtggtcaggtcgaccgagggaacggcccgatgcgggtgcagcgcccatcccaggtccaggaacaggggtgccctctccgacgcgagctcgaagacgcggtccgagagcgtcagcacgcccgggaggcccaggatcacgggttcgacacggtccactacctcgcgaacttcctccacccgaccgtcgtcctccgcgatcacctccaccgacgcggtcacctcgtacccgacctcctcggaggcctccagtagcctgagcacggtcgagatcggaggggtgtagagcgggaggtgagcgtggacgcggcccggctccacgagctcctcctccgcgagcttcaccagcaggcccaggggatgcctgacgttcctcacgaccgacccctcgagtcccaacctcttcagcaggctcagatccaccttcaaccttctcctgagcgccagctcgtgggcgtcggacaccaggcggagaaaggcgttgagctccagcccggttacccccttggcatcacatcacggacgtccggtgggggcgagaagggctcgtagtctcccagtctcccctgggggtgggcaacctccaagtcgcacacatgacggctcatcaccgcgcggtcacatcgcgcagccctcgcacacgtccatgattaactcttttcacggttcacgacgcgttccgactacggtggtgcatcgcacccgcgctcggacgagatcccgaaccgtcctaccgaacgaccggtgccccactcccggctcgagccgtcggatggctcgacatcacgcatcgcaccccgacaccaatcgacgcacgctcgagcgatcacgagagggagtcggtggccggccgatcgtactggtaggttcgcctggaagcacgccctcgccgaagcgtcggtacggggcccttaaatccactgtaacgcgtcgtcgagctgactgaggatgacgtcatctcggggagtcacggaccgtgttcctcggggattagaaggaggtaatccttaagatagcccgtgcggcgcgcgaggtcctgatgaggatgccaggatctacgtcttcgggagcgcagttaaggacgagatgacggcggtttccgacccggacgtagcggtggtcgtggaggacgaggtcgatcccgggaagatggcctccgatatcctggaacgggcgggtgtggacccgttcatcccagtgcacctccacgtggtgacccggaacgagttcgagcgtaaccggcccgacgtgtacgtcgaggtgagaccggacggtaccctccgcaagcacggtaggcccgaagtaccgggtcgctcggcgtcagcggttcgaatcctgtgggagtcggggctcgcgctgctcgaggtcactgacgagctcccgccgctggccggcctcgttaccgcccacgagggactgaagctgtgcctcgaggcgacgaccctcgcgctcaccgggtcgccatctcgggacccggaaaacctaccgcgggacgtcgcccgggacgtcgaggaggttttggaggtcctggaacggcgcctgagagcggcccgatagggtgaggagccggatcctgtggaggtcccggagcacctcgacaggtgcaggtcgatcgtggggcggctccgggacgcgctccccgtcgggctaccggttccgggaggtatggacgtggacacggaagagctcgttcggatggccgagtggaagctctcggaggccgagcgcgcgctggaggagggcccggagtcgcccgcggtcgccgaggcgcatcaggccgtcgagctcctcgtcaaggccgcgcttcgggagctggacgtcgagccaccgaggactcacgatatccgacggctcctcggcgtgctcacgacggagctgctggacctgggcgaaggggacctggcggtcgaggtccgacggatcgccagggagcaccgcgacacgctggcgtcgctcctggaggggtacttctccctgttcgagccgcccttcgagggagacgccgaggaggtcgtgcgggcggccgggaaggtcttcgaggacctccgccggatcctggagaaggtacgctagataccgggggactgacgtcaccctcggcaccgcggacgggtcgtcaccctccccataggccttcattcgagctcaggtatttccaggccttccgcgcccgagcccggattcctgattcgtgggagttcgcgggagtcggatcggagagcttcccgcgtccggcgggtgcgaccgacggtgcgcgttcgtagtcccttgcctaacggaagttcttacccctccatcatcgcccggaccggcgcgttgatccactgcaaggctagtgccagcgcgcccagtgcgtgcagtcggatcgggtaggcgaagtacaggatcattcgcccggagcccgtccggacgatcatcgtcccgcccgggcccatgaggatcctcccgccgcgggcgtgccacgcggggaaatacttcaccttgaccaggacccaccggtgaccgctcgtgtccacttcgacccgatcccggtgcattcgggtcggtacgggatgaagctccgatccgaacccgttcagtatctgggagtacagacgccgttcatgcaggctcgaccgtcggcaggtgatcccaccggcgttcggcccggaggaggtggagggagtgccgccgagaagcgtagagcgacgacgcgagcagggccggggcgaggatccgacggtccctatcggcgatcgacagagaccgagcccgaacgatagcgtcatcgggtagatgccgcccatgatccactcgaactacatcccggaggccgcgagcgcccccgtcccaggctgagggtctcgccctaggcctagactcctcgcgagcgcgtacgcgccgagggtgaacgagagtgccgccaggaggagcccccgcgaaggcgctcgggccgctcaggacccccgccagcggggcccgtgaggtggtgggggaggaggcagtagaaggtcgtgtacgggaaccccaggtaccagtacgggcacaggtcgatcgggtcgcgtccggtgagcgccctcagcgcgtactccgaggcgagcgcgtgcgggaggcgcgtcccgcggcactcaggggttgatcaggatcggggagacgatcacgaccgcggcgagcgcggggaccgcctaccacccgtgccgtctcacgtcggacaccctttcccgccggcgacgattgggagatcccggcctcttatccgcgacgatcgccccgcgccccgatggtgcgatcgagacgttacgagttacgtaacgataagacccgtcgtcggtgtcgacgtacatctctgttgtgaaccgaccacttacgctttgaacttggagatcaacctgcactgatcatgaaagaaatggatgaataacttaacgtaaagattcttacagtgattacagattaattgctagcgagggaagagactacggcgagaggaccaaatagatggcgattcagggggctaaagaaggtcactaggtttcattacccgtattattacgggttaattgcgagatgcaggcacaatgagtttgcggacaaagacgataatgtattgttaagagtgtatacgtttcattacccgtattatcacgggttaattgcgagtatgttagctggtcgaggaaattgtggcggtgttaaactccggagaaacacgtcgaacccgtttcattacccgtattattacgggttaattgcgagctcgcgatgcgtgtgcggaccgcaccgtgcccgcgtgctatgacggatctcctcttcgcgacgtttcattacccgtattattacgggttaattgcgagacatgaggtccagttccagaagcctgagcggaagcgcaaggcgctcgacccggagtttcattacccgtattattacgggttaattgcgagggtcaaggaagtcttcccttcactgaaggaaaaactagaggatgacgaggtttcattacccgtattattacgagttaattgcgagaacctaacttagcatatgatggtggttataattcagatattaacgctagcatatcgtttcattacccgtattattacgggttaattgcgagcagactgggtaagggaggacagagacggggaggtggagacatgggtccttaatgtttcattacccgtattattacgggttaattgcgaggagggcaatgaggaaggaacagctgagagctcggggtatcaccgagctaacaccggtttcattacccgtattattacgggttaattgcgagtcgtaggggtagtagaagaagcatacgaaggactcatggaatcctgcaaagagtttcattacccgtattattacgggttaattgcgagctagctgtgaagggagtgtgtgtagcgagcccctgagaaaaataatccgttggttcgtttcattacccgtattattacgggttaattgcgagtgctcgcccgcttcttccgcgagaccctgtatcatgaccgggaagaacgcgctaccgcttagcgagaagaacgtttcattacccgtattattacgggttaattgcgagggcgggcggttctcccggaggatcaccctttacactccgaaaccaccgaggagattccccactcctcactcactaggaattagtataccggtcctatttaaagattaccccgattccgtcgaacacttaatcatactaaaatccgatactaatttgtttccctttagtcaaaagtttaatatacaacgtcggtaatgctgaaaactatagtttcttctgatgagtaattaataaattaacttgatgaagtaataattacaaaatgctcataaactactttagtacctcgtgagaactgtagttctttgctaacggttagaatcgttatctcttcgaattgaaataaggtgcaaaacttgcactattaaggtgcatattttgggcttcaggaaaaaccattaccagtattgataagtatgagtaaacatagtaatacttcatactcaagcgcttcgaaactaccgcttcctacgcggaagaactagcttttctaccaagttaattaactcaacggaaaattagtacgacataatattactacttctggcattctctcatgctaaccctccacgccgactcgccgaaggtttttgtcatccgatggggctccgggacatcgaccgtgggcgggaacggcgcgctccacgtgctgtccgatcccctaggagagcgtcgtgggatcacccgtctccggtggagggtgggagcacgggatccccgacggtcaccggcacccacgtgcgggacgggaacgccgtctcgggaggtgacgggaatgtcggcagtccgagtcgcagccgcggtcgcggtgattctcgcactgatcgcgacgccgtcggaggggctcgacccggcgacgttcgcggagctcggcggcgccctcctccaggctggggctcctgttgccggagtacccgaagcccgggacggtccgcgaggccgtgtacgtgttgtccgtcccgggggaccgggccacgctcgacctggtgttcgacgtgcccccgtgggcccgggtcttggacctgtacctctccgcgggctcccgggtgctcggcgcagggatggtcccgaggagtgcctactccgggctcgaccactacgtcccggccccggagctgcccgggttcgtgaggctggaactggcgggtgagcggaccgagcggtggtcgtcggatcggttcccggcgaccgacccgtggttgagggggctgttgaagcggcacggcctgcgctggaccgtggtcaggtacttcctgccgcggaacggcctgttctgggcgaggtgcgaggtcccgctgctcgacgggttcgtggtctggcccgccccgttcgtcggcgggtactacgtgtacggcggtgtgacggaggcccgactggtcccggagggcggtcccgaccggcggctgacgttcggacccctgcccccgctctccgatctggacgcgaccctggtcctggtcctggacggaccgcccgcggtcgtggtctcgtcccggggcttccaccggaccgtgctggtgttccggcccgtgggcgcgtcgccggaggcctaccggtacgcggcggaccccctccgggtcgcactgggcctgctcggaggggcggtgagtctactggtccggccgacggtcccgaaggccctggccgcgctgctcgtcctggtgccggtcgcgggcctagactaccggtggccgtggctgacgggctgggcgaccctgggtccggcggtgctgttcctctgcctgctacacgtcctctgaggggatccgcgtttaagcccggtgcggtccgtgaccccgggtgacgccgcttgcccggtcgggtacccaaggacgtgtggctcctaggagcggtcagcctcctcaacgacgttagctcggagggtatcttcgccctgctcccgtactacctgacggccctgggtggcggtcccgcgctcgtcggagggacctggggaggtatggagctcgtcaagagcctgctcaacgtcgtctccggtcgcgtcttcggccgacccgggtgggccaagccggccgtggccgcagggtacgggttctccgcgtgcatgaaactcctgctcgcgctcgtccgggatccggtgaccgcgggcctggtggcctcgctcgagcgcgtgggtaaggggatcaggacgccgcccagggacgcgatcctggcggggttggcgggatccgagcccggcctggtcttcggggtgcaccgggcgctggacacttcgggggcggttctcggggcgctcctcgccggggtcctcctgacgtacggggtgcccgcggcgaccgccgtcctggccttcgcgctggtcgggttcctctcgctggtgccgctgatcccggtggaggagcggctcgaggagggatcctccgagggggaggggcgcggtcggttcccgcgggcgctcgcgatcgtcgggctctaccggttgggcgcggtgggctggatgatgtactctctgagggtcctcggggtgcagggtccggccgcggccgcgttcgcctacgcggggttctccaccctgcacgcgctgacctcggtgccggcggggagactctcggaccggttcgggcccggggtcgcgctgtgcctggggtacgcgatgacggcggccacggcgctgctggcgggttcgggactcgcggtggcggcgttcatgctgtacggactggcctacggggtggtcgacgcggtcgagcgggcggccgtggccgagctctcggggacggcggcctcgtacggcgcctaccacgcgctcgtcggggtcggctcgctggtctgcgggctggtcgtggggtggctgtgggagtccgtctcgccgtgggcggccttcgggtactcggcgtgcctgaccggggtcgcggcggcgctggcgccggtcctgatactcaggagagggtccggcgggtgagctcgatcgggtccgcgcctcccggcggtcttcggcctcgtccggttgtatgggagagtgggatcgcccgtgatctccctgtcggggcagtgtcgtgatcgcggatggcaaggtttatattctgagatgtcgttctctccctatctccatacaacttgggggcacattagggggatcgtgtgccggagttggtcgagtcgcacgtccacgtcccgataccttccgatcccgtggaacggatccgagccctccgggtcctacgggaggtctaccgtcgtgggaagaagccgagcctggaggtgacctaccggaccgtgggaggtagcacgtgcgggccgtactacgtcgcgaggtggcgtaaggattcgaggttcaaacacgggcgcacgctttacttggacaagtccgaaaacgagagcgtttccttcgtcgagtggctggtttcactggatcggagtgaggttttggaactagcccgacatctcatgaggaacctccgctcggtgctcaagacactactcaccgaggtcttaagtctcccatacaagaaggcgagacgtgtgctcacccgcgggctcgcactggccttcgacgcgagaccctcgaactcaccgcggatccgggacctcctcgaggaactacccgaccggctcgaatccttcgccgtgagaaccctgggaggctggcccgcccactactcgagctacctgaggaaggtgatccgctcccgcaggaggtccctcgacgggaggcacgaggtacccgacgtggagctcgagctggaacgctggaaactccggcacgggtgatccggacactgaccgcatcgacctcccgacggcggcaccggtcagaactcctcgtactcgtcgaggagcaccctccagacctcctcgtactcctccggggtggcgaggtggaactcgatcgggtgacgctccgggaggtcgagctccctctcgaactcgcggatcaggtccacgcggtcctccaggtcctccgggactccgtcggacacgatcagcacgtccaggtcgctccccgggagcgcctcgcccttgaccgcactcccgaacacgaacacgcgggtcccctcgccgaggagacgccgggcgaccctcgcgatccgctcgccccactcacgccaccgcgacacgaactcccggtagttccggcggttgatccgggcctcgaggacgtataagtcgcgacccgacacggtgagccccgggtctcccgatgcgcaggctgaggaagaagcttctggagcgcgccgaggggtcgctggaggccgcgcggtggctcctgggacgcggtaacaccgacctggcgttggtcatggcggagcgggcggccgggctcaggatcagggccgcccagatcctgctcgcgggggagcacgcgcgaggacacgacctgagggacctccggggacgagcgcatcgacgggttcgtgtgtgagcacgcgaaggccctcgacgtgctgggcgtggcctacaccgagtgccggtacggcgcttgggagccctccgaggagaccttggagtgggccatcgggaccgtcgaggaactcttcgagctgctcgagcgggtggagagggaccacggaccggcctcacgaccgtgacccgggtggtcggtactccttcagccccgcccactcctcccacgtgtggaggacgatcctgttcatggtccacctccgggcgcactcctcgtcgaacgtgacggccacgggtagtaccgcacggtctcgacgacccgaccccacaccgtgacgatccggtgatcgcgcacccacctctcgtatttgagcgtcaggaggaaacccgtcagcatcgcggccggcgcgagccacccgcagtacggcggcaacgacccgaggactgtcgccgcgcccacgcccgtcccgacgaccgcggggatcacgaacctcgggagcgcgggcttcggaaccccggtagtagcgtcgcgacgtccgaacggtacgagaacaccagcaacccggcgaacgtggacacgagctcgaacctcaccgacggtggcgaatgaccgccgagcaggacgctcatctcgtaggtaaacgccagcgcgacccatcccatggtggagacgaccaggaggtaccccgacggggcgcagttgatgaggtccggcctgaagaccagccgggtgacggggtcgcaccgggagttcttgaactcctccggttcctcccatgacctcggcttcttctcctcgacccctcgaccccgaaggacgtccatggcccgtttcctccgccgctcccaggcgatgtggagtatgaacaggccgtacgcggtcacgccggtgacgaccagctgcggcgcgaggatcgcgaccacgtactacatcgggatcaaaccgacggttcccccgagagtcccccggtcacggtacgatgagttaaaccgcgtggaacccgggcgggcgtcgacacccccgtgacgcgttcacacccggagctcgggcctgggcctcgccgggtgcgacaccgcagccctatcccagtcgtgtgcggcccagtccgagtgctcgtagtacgtgctcccctcgacccagcgcacgctcacgagcgactccctcgcgacctcgaaggggagccgtaccctccagggcacgtgcgtcctgaaggccctcacgcgctccccgaggagcacgtgcgcaccctcgggtaatggtccgtcctcgaggaacgtcgagtcctcggtcaccggaaacccctccgggtcgggcacgaggagcacgacctcagcgcccggtgggccctcgacccggaggacaccctcacgccactcggaccgcgcctcacccaaccgccggaagaaccgctcgaacgtacccggcaggtccccggaagccacttcgacccagcggtcgtctcggagcctgaagagggcaccctcgtccagctcgggggtgcggaggaccgcggtcgtgacaggatggaactggaacgtgcgcatagcgtccaccctcccacgccaagagggccgcccctaccgtgcgacctcccgatatcactcccggtaccaacgggtattaatttaacgataaacgagatgaatcggtggggaccgcgccgtccggaggaatcaccccaggagcccgcggatcccgtccgcaaggtcccgaggcagttaagaccccgtttcatcgaccgtcgggatgcttccgatgaagagtcactcccctgccgagtggtgacgagttttcctcttggcggaggacgtccgaggcctccgccggatctcctactccgagttgaggatgcggcgttgaaacggtaccacacgggtccggacggaccgcggcacctggagccacttccacggagcgtacatcccatcgaagccgggtaattcgtttccgaatcaactcgccctcgcagtgctccaaggcgaggaactcaactttcggccgaggcccaccctcgacacgtctcggctccgcggacatagcccgaggatggaggagacgtccaccgccacgctcgtcccgacggtgatggtcggtcgacccggaacgtcggatcctacgacgtcctcgagcgctccccattcctccttcggatccccgcgatctcgtagtaatccggtagcgacttgaacctccggtgcttgcggatccacttgcccggctcgtcgtactcgacatcctcctccgagtcctcctccttccgagtgtcggcgatagtggcctcgcccacaccgttcgagtctccctccaactcctcccacatcctcgcgtaatggagctccttaggctcccttccaccacgcaacgtccgaacgatacaggctccgacggctacgaagtacgatatcgtcaagatcagtaataccgtcttaatgtccacctccagctcccatccgacacccagcttctcacacacctcgtcccaagcatcgatcgagaggactatcagaccggaggtggagggtccgactatgggcgggatcccgtcgatcgcctcgaaccccaggtacgccagcgatttcacctctatcccggccagacgcccgcgactcccgagcacgaacgccttgatccacctcttaggcacgctcaccttcccctccatcaaccccgcgaccgccaacaccgcccgggcacgcagttcacggacccgctcgggcttccgggtcaacacgaaccctcgcgagacgagcacgatcgtgtgggccccaggggagggtttgatccggatctcgtccccccgaggtcgaacgaacacctcgtggtacgaggagagcaaaccctcgcaggcgagtaactcaccccgaccggggagcacatcggccaacctctcggccaactcctcgtccctcaagaaagtgtgaacgcgccacgcatccacctcaacgtgaccgccgaaagtcacgataccgacacggtgatacttgaacgacgaaaccctgacgacgatccaaccgtcgtcggtgctcacgtctttaacttcgatatatttgtttaaaaccaaattcacaagatagggtattataaccaaaattaacgctatctcgaatttgagtcgagcacaaaagaagagcccaaatgctggaaagaaagtcattagaattaaactagcgacggctggatggagtactatcggagtcggtaacggtatcgtctttctgtaaattatatagtatttcagcggccctgatcgcggttttggttccgataaattccacaggatagctattggatatgaccatatcggaagtgataaccaaaatattgtaataatgactactattatagatgttaatccgatattagacagtaagtagtccaaggagtccaagggcgtcaccctctacgcgctttatacaaatacattacttccgtcaacaggtccaatactttcctcttagaggttataggagagattactagtgagatcccagtagatactgcgacactggcgagttggggtacgatcacgtagaataagatcgcgtggagcgggtcactactagcttttaatatagtgcaaattatgtagtaaactatgactaaagatagcacataaacgatgattggtgtgaacgccgggtggagactcgagagtagcattagaccgttactcttcacgattctatggctggattctaccaacgaaacgcctttggagcccactacagcgaactctattaaccattcgagtaaactgattcgatccaatgatacgttagtcttttcttctatatctcgtaatgttgaggtgtaactattcctacctaagagcaatggtaaggttacagtagcgagcgcgtcaaagttgtaaactttatctaaatttgtattagattggcttgtagtcagtgtaatcccaggagtaatcactgatacgatattcccgttttcagggttgtgttttacttcaataatgctcgagcctggtttcaacacgcctaggtagaagttgacacgttcgacgccatcaagtgtggaaaataatgttctcagaagacgctcggtccgctttgaaattgagtactttataagttcgctaccgcgtgttttaagttctaattggatgttattagtgtgtatattctcgctgaaactagcgattaagattggttggtaagtgattgtgaaaagcttgattctaattttgtggttagacggtaatactttcgctatagttatgtatggggtcattgcagcgagccagagtgacagtgatgctgtgatggtaactatgattaaaattgctgtaagtctgaggaagtggaggtgcttttctttggtgacaatacatacgccacactctacgaggatacttatgagaaatacaatatatgatgataccatggatagtccagggggtattaagatcgggtacgatcttaagattacgtgatcatcgagtgtttctcgcctgcacctagcctctcgccgggccagtcctctcgcgagaacgaccaggagagggggtgtgatcacgatgatcgagaagaggatcgagaagagcgtgatgaaggcgatgatctgcccgggctcgagagccagctcaagccgccccccactccttcttcaacccggccgcatgcggtactcccacgggctcacgctcgtcatcaaatgccttctttatagtctccttccccttttcttcccagcacttgggaactcctccgttgtaagtaggcggcgttaatccctcagtagccttgttggcgagacctttagcgagagtcccagacactaagcccgagacaccgacagctgtgttgacgattctttccctaaccctccctctatcaccacgcatcacgtcccccacgaccctcgaagaccaggctcaatattacgtacagtgagaggacggggtagagcttccggaggaggtcacccacccggcccgactcgacccgcaaggaaccagaactccgatacgacctccctcacctggggatcaccgcagattaagcgcaggaagtcctccacgggcgacggacccccgcgcgacctccgttcgggcggagggggcggttcctcaccgcctttcgtctccggagagttcaaatggggagcgctcaaccccgtcccgtggaccgacggtgatcggcgggggcggtcggggggcttgatcgaggtcctgacggtcctgctagcccacgatccgaccctcatggacccgtgcacgcacgggttggaggtcgttgtcaccggcgtgcggggcgccgggagggttgggggtgggagggaggagaccggtggcgtgggtaagggcgttggaggcgggggtcgtggtgggaaggttggtgggggcgggaagaccgtgcacccgagtgagttgttgacgaagcccaagtggcggttcctccgcgagaccctcgggggcggggtgaaggctcgacgggcgcacgcgttccgatggttgacccgcgcgtaccacccgctccgatcgtactacctgtcgagcctggcgaccgcgttcaccggcctctgcgtcggactactggccgtccccctggcgacccgcgctcgacggtggaggcccgagacggtcgccttcgcggcgatcgccctgatcgtgacggtctcgacactgtgctgggaggcgttcctggggtacctagcatcgtgccagttcctcgctagggtgacggagggggacgctcacctcgccctgagcgagttccgtacgtgggggatcacgggcgtgggttacctgctcgcggtgtacgccgtcctcgcctccctcctggcgtgcgcagcgtggaggaagctgggcggtcgagcctcgctccgcctcgccccgctcctggtgctcccgttcctaaccggactgtggttcatccgactcggactcgcggtggcgtgacgcgatcgggtcaccatccctcgagagccacttcccataccacttcccatcgtagggatcgcgccccagcacgctctcgtacactcgaccctccctcacaagcctccagctgcgcagggccgtgtcgagattgatgacaaacacccctagggccgagacgggcgggatcaggaggatcgccggggccaggtaccaccaggtgtggagaagtttcaagctcggcttcaccccgatcagcttcacccacgccggcgtcaccagacagcacacaccggtcccgagcatgctgacggcaacctcgtagtgccttaacacgtcagtcagggaaaagcggcggttgaggtacacgagctcgttccagccggctcggttgttcacgacggaccccaacagcccgtccacctcctccggctcgggggactcctccttctccaagcacagggccgcgtacaccattgagaacttctcccaccaccgaaggaggtggaaggccttctcacgatccttcagcagtccctgagcgtcgtggagtacgcacacacctcgggtcctcaggaagaggaagccgcagtcccgaacctccaccttgcacggaccgggcctgaagtacccgacccgaattctcaaattcgatggctgaccacccggcgcctccccgtacctaaccgggtaggagctgagctcccggaacctcgaaacctccacctccccatccgtgatcagctcggcctcgcagtaccccagtgagagcagcgcgatggagagcctccgccggtcgcccctcatccgggggaatccgatgaacccgagggtgagggcggccggcagcgcgctcgacacggtaaggcaaagcatcaacgacgtcagggcaaacacgatgaacgacgggctaaaccactcccgcccggttaggggtagggaccagacgacgaaaaccgggagtgtggacgatacgagcagggagaagagaatgagttctccaacctgagcacgtgtgaacaacaggcggaacgaggccgtgcgacaacgaacggtacaccgatcgtgaaacgttacgtcgcggggccctggaacctcctcaccctggaagatcgcatcgcatatcccgaaggacaaccatacgcttaaagcgcacgatcctatcgatacggcaagtacactcaagattacaattgaatcatatccacagatcgaaccgagtactacataggccaagagagagacgtaacccaagctcgccagtaacagcttagatgatctagagatacgcatcgtcgaagagcagcccccaagccggcgttacgactagtcaaaaagggacgagtcaaggtcatagagggatggccaccttaatgcgtacagtgatagtgcagtggtaacaatcacgtacgttgcttcatcgtactcctttttgatatacttagcaaccgctcctacagtcttaaatagagctccaataacgacaagtgcggttaagatccccgttacatttaattgtaaaggtggcaagcggggtgatacgtacggcaatatccacagtgcagtggaccctatgttcatcaggagatctccgaaggtaataagagtgtcaggatccaagcccctcttcttgcggacataatcccagagattggcggcatcacttatgccgaggggataggcccgccgaaagaggtcacgttctcctcgaagaatttttggaacgcttcacctagcgctgatattatgctcctcttatcgtctggctctagcggtgatgctgcgatcgccccgacgaacgtaataaacactgagtacattacttgcgttattacgtagtcaaaatacattaaggtggtgactccttttttaccttttgtatatactttcagcgttccagtcgtcgggtcgtattctggtacttcccctttagtcaacatctgtattgaagactctttgctagttcttccgtatggttttacctccaattcctttagcagtctctctaagcccagcttgatgttgtcaggcagtagtatccactcttcctcaccgtaatatggctctccggtaaccttagaaattacataattctctataacctgtgttagtatcgaagccctagtgttgagcgctcgttgtgtcaccggatccgcgtagaattcaaccccaagtagtaccgtaggcgtgtccaaagagagtcccagtcggactttattatcatcctatttctcgaccgtaacctgtgcgacaatcactccgagtagagccctaactcaactcgctttataatcctaacagagcttgtttatagtttaattgtaataataagcttcgagaattagtagtaagcttgttagtactatcagggctagtttctcatcctatttgacctcgtccttgagcccagctagtgcttgggcccatttggtaaagtcctctggggagtactcgaacccgggtggtaggcataatactacgaggtagaattcactctctaacttaatagtacgtagtgccttcggaccgtactccacggtgatctcgttaactggtggagcacgcttccactccgggggtagtaccggattcctcagatcgatgacggaatactccaggtcccctcgggtcgtgtggattagtagtagactgggctcggtgaggtcgatcgcttggtcatcgagcttgaccctcaccttgagctcgcacagtaactcgctcttacccggttccaacagcgcgtggtactccctccccactcggtacgttagtcctaggagccagactcgggctcgcggtggtcggtccaagaggacgagcttctcgatcctctgaccgggtggtgcttggaccctgaggagccaagcgcgcactctcttatcatctcatctagctgcgccagctaagaccgagccctgtcaacgagtgtcactgggtccggcgccccccgatacaggaaatcgttgtaataaccgtaacgatgtgctcttacactgtcggattggaggcacgccctgagtactctctgtaaacttcgggttatcacactccgaaaactgtaatgatcatttagtctcggagaagtgaacgtctgcgcgactcggtcggttaggggaacatcgcgggtatgtcccggttgagagtagcttcagtgatcatctggttgctgtggatctccccaccggcctccgggtacgtgtgctggagtgttcccgtcggggagtccgtgacctcggtcgaatcatgtggggacgcggccgtactggtgacgagttctaatcgcgtcctggtggccgagctcgacgcgtcgagcgtccgactctcggaggtcctcaatttccacctacccagtggaacgaaagtagtgtccgtgatgaggagcggattaggactcgtcttcgacgcgggccgaatcctcgatgacggcatcgaggtctatcgtggggttcttacacacggggatagaggatggaggggcgaactggttcggaccgtagccaagttcgaggagatttcccaacgggtcaagtccggagagtggcgagtcctcgaggtctctaacctggcttccgaccgtactggcgggctgtacgccgccgcgctgttagaatccgtggacggggatttaatcgtagaggtttggaatttaccggagaggagcgtgatcgcggacttctcggcgactgaggtgagaagactggcgataggggacgaaggcacgctcttagtggcgtgtggagatggagtcgccgtcgtcgacggtaggaatgtacggttcgttaccgtccccggtgtcgtcatcgacatggtgggaaggtgggttctgtacgaggattggctaggttacgcgctgggggaggttacgacttcggggttacgtgagctggtgagattacccgggccagcgcatcgcgtgaccgtatggtcgacgggtggggatgcctacatcctagcttacggtgggaacatcgtctacgttgtggaccccgaggatcggaccgtagtaacggtgttagacttacccggacgcgtggagttcctcgccccgcctttcgtcgtttactccggtaaaatcggcgtcttgtacctcgccaagattatggtacaactggaagagggcttgtgtccggcggtgaaaacgtggttcgtgtggctggactggtgtgccgtatacatcgtcgacaggaaggtacctgcgatatacaaagtagttgaagttcgagacaaattaggccctaattggattaaaactaggagtggaggagtgaccttttggtacaaacgagtctttttaaaaagagtttggccacggcaccctacagaacttcatcttgatgatattggtatcgtcgtaataggagaacgtaattctaagatacgagtatactgcttagatgaacgtactgaggaagtattgaagaatttgcttcgttcgccggacgtatgcgatatactcaatgtgtatcctggctctgcagtcttcatagtagatttcaaatggagggatcaaaggataccggccttccggtttgtcaggaagtccgggtggctggtcacggggttcatcgatgaggacgacgtctgcccgaactcggattacgacgacgtcgtcttgagcgtcccaatctcacccctaacggccgctcactcggggatgccggtaatacccttactctacggtaaggactgggtattactatcggcactccttcccaacttcgactggtgctgggataaaacgagcgagttgaaagtgttcgttaacggtaaggagtccgagttctacgtggtggactggtccaataagaccattcgtggtccgttcacgaagttaaaattaaaaattggtaaagataagcagttattcatactattacgcggcttgtccgaacccgaatctatcaggatcgttctcaagaggcctttgggacccgtgtatgagggttatacggaatacgccccgcctaaggtctcgatctcccgaccgtccgcccgtttagtcgagtataacgcgaaggaagacaaggtcacggtcgcagtgagcgcggaagtgagcgtccgaaacaccgtcatcaggagactgacaatcgaagtgttcgacctcttcggtaggacactaacacgtaaagtgatggggcctctaccgcccggaaaacaccatatcgaaaaacgactgagtttcatgccccccgagcacggcccgctcaagatcatcctcctcgccgagtacgacggtgacctggttatcgtgagtgatcgtgagttcgtactccgggcggagcccgagcgggcggagctaaccgtctcttacgaacgacccggtagactcaccgcacgcgtactggactacggtcgggattgggtcgaactccgcgtagaatccgaggaacccgggaacctccacctcgaggactcgaagggacgacccgtaccctactacgtcctcgagggtaacgagctctcgggaccgtacgacggggaacacccgctcgagttgggcacgacacccgtgatcctcatcctacgggacttgaaacccggggaggcctaccggttcaagctgatacgcgagggtaggatcccgaccgcgttcgagctcgagtgcgccctccccgaagccaacctcgacgtcgaactcctgagcggtaccctcgagggacgctctctgacgttgaaattctcagtccggggctccaccgtgaactcgacgttcaagaggttgaacctagtcctgcgagaggatgaccgaatcctctggcgtgaggaggtcgacctggacaataccacgtggttcgacctacccttcgagaccacggtcgaggtgggcggtgacgagggcaccctcaccctcgaggtcaccgcccattacgaccacgacaccgtcctcccggagggtaacgagttcgaggttcgagaggcacccgcgaggcgggtcctgaggatcgcgtacggtcgcccgcacgtcgaactcgaggactacggactcaactggctcctactccgaatcctcccctggagaccgggcgacctactcgtacgggtgaatgggaaaccagtaacgtactatgtgaaacatggaaacgagttcgagaaacactccgaggacgacccgtaccacgcgagcggggcgaacgcggtcgaagtcctactgtacgacctcgagaagcacggtacgatcacggtgatcaaccggtcgagcactctctccagtgctagcacgctcgattacgcgctacccgagggtgtcgagctcgccgcggaggtcgtcggcgggaggtacctcgtcgacgagggtaggctcaccctgaacgttcgaaccctcgtgagcccgatcgacgtcacggtgcgtcggatcatcgcccgcgtcctggacgacttgggtgaaatcctcggggagacggtgaagaccgtcgagttgggacccgggatccacgagctcaccctgccaatcgaagtccgcgtgcaccgagagtgcggtcgcctccggttacaagccctcgccgagttcgatcacggtacgatcgtgagagatcccggggaaggacccgtccccaacccggcctcgcgcacgatcgagttctcgtactcggccccgagcgtccgcgtggtggaccgggggatcgactgggtattactcgaagtgacgactcgggagggtggtgaactcgtcgttcacgtgaacggtcggaaggcctggtactatctcaagcggtcgaggggtggtgattgggagggcccgtacgatccgacgagcgtgggcccgaaccgtaccgtgctcgtcctcgtcccgggtgtcccaccagaaggtaggatctcagtggtcctgggcgggcggctcgagagggttcgctccgtggagtacgcgcttcccagtgtaatcgcgcgggttgatgtagaggacgtctcggtgagcggggagaaggtgatcgcgatgatctccctgtggttggaggttctggggactacggtgagaagcattggggtaagcgtggacggcgtgaagtcgtggtcggtgagcgcgctcgaggacggtgaacccctgcgattggacgacctggagctcggtgagggagtacatctggtcaggttatccatcaagttcgtgccgaaggagcgggctggtacggtccccgtaaccctgagggtccagtacgagggtgactccacgttcgacccgggacgccgcgagttcgtggagagtcctctcgtcctgaccttgaacgtaccctacgtcctacctcaacggcagacctcgaaggagtccggaccgaggggtgggagtcctaaggtccccgagcgcggtgggaccgcagtggaccgagggagcacgaccgccggggagtccggcaccgggcggagcgccgtcaccgaacctacgcacgcctcgactcgagtcgagaggagaccgtccaacgaggagagaccgcacgtcgtacgacccaccccaccgacccgattcccaattagacccgtccggaccgagacggggcacgaggtcaagccgaagcccctcgagaagcttcccgaggctcttccacacccttcgagctccctccccgacaccctcgaagcgcggttgacccccgtgctggtgagcctgttcgacaggttatgggacctgctcacgagtctcctctcccaacccacgatcacgggccacgccgagggtgaacccaccgcgaaggtaacccggcgtcccatcgaacacgcgccgagcgagccctcgagaccccgaactccgacggggagcgcggccctccagggtccaccccacggtacgaccgtaccccaaggataccaccgcgtgggagccctctcggcgcacgcgcctcacaccttccgggaagtggaaatccttaaaacacgaacccggggttacgcttacgcagagggaacatccagagtctcgcggtcgctcacccgcctaccacccacgggcgtcaacctgctagccctcctcctgagcgtattcggcgcgctaaccggcctgtacttgacccataggtcggttcggggtggggagggcggtgagtaggctcctccccgtggtcctgttcctagccttggtatcggtcgtgcccgtgggcgttcaagcccagtcgttcaaagtctgggtcgaggtggaaccctcggtccacacgttcctcggggccagcgtgtacctcgtggataacgagcacaaggcgttatactccctgggcgaatacagtaccgtgatggaaaagtccaaacagcagactcaaccgcgaccactctacccgaaggatcggagcgaacccctcggagaactcgacctcgacgccctcggcgtcgccgtctcgtgctggttcgggggcgtcggttgctcggacgatcggaccatgcgaaccctcctccaggtactcgagatggacgacgaggtccgcgcgcgagtcctcgggaacgtctgccccactctaaccatgttcgggaacgtgcccgtgcacgtgaccgagtgtcgcgtcgagaggaccgagaacacactcaccttcaaattcacccactacgggatcaccgtcaggatcgtcaagagcgagctcaaggtgcaagtcaccgactacgggagggactggttactactccacgtcgaaccaccctcgagcgggaagctctcgatcgaggagaacggtgagacactggccttccacacgctgacctccgacgggaccctctccggaccgtacaccgtgctcgaggtggaggaaggccgccccctcgatctagtcgttaaggacctcgagcccggtgagaagagcgccctcgatgtagtccttgaggacgacctgggcatcacggtcaggaaacgcgtcgagtacgcgctaccactggtgaacatcgagagcctcaccgtggaaccgggtaacccgctcagagtgaagctcaggctgagcgtgaagaacacgatggttaagaggatcaccgtacgagtcgtggactgcactaccggcggggtgctcaccgagcgggcgttcgacgtcggattgtccgagggcgagcacgagctcgagtactcgatagaaaccccgaacaccacggacccgctcgccgtgttcgccgcgatcgagtacgatcacggtaccacgctggagggcgagaagttcgagcccgtagaaacccccgcgcaggacttcaccacgatcgtaccctcgacaggcacgcccgaggtcatgctcgacgtcgagaccccggaacgagcccatctgggactacccgtcgagatgacggtacacgttcggctaggccggatcccactctccacgggagaaatccgagtaaccaccgaggacgggaaaaccctcgcccgaaccaccgtctcgaacggcgaggcgagaatgctcatcctccccactcacactggcgacgtggaactccacatcgagtactacctaggctcgaggaaactggccgagagggaactcaccctccacgtctcgaacgagttccacgggttcaccgccgacatcgtgagcccgggcaacctgggctccctgggctacgacctccgcgggtcgtacatccccgagaggaaataccccgcgaaggacgagcccatgttgtacatctacaggacctggtgggatgaatactacccgttcctcgtccaacccgcggaccgcccgaacgccctcctcgcgaacggcctgaagatcaccctacccgaacccgccgacaccgtgtacatgctaaccctaccagtacgcgtccactacccgatcagggtcacgatcgaggactcgagcggggagcgcgtgaccaggaaactctggtggctgaactgggactggcaatggtggtgggaccacggttggagcgtgtaccacctcaggctcacggcccgagacctcggtctaaaggacatcaccgaactcgagttcgacgtgccgaacggactcctctggatcctcgcgctgacctaccgctcgggcgacgcgtacaaggccctgatcgaacccggaaagggcgtgaccctctaccgcgagcccggaccggtcgagatcgagctcgagggctggcccgcgggctcggaccacgaggtagtctggaggaaggtcggggacgagtggatccccttctacctgtgcccgaaggatcacccaaacgcactccccgcagaccacctactcctccacataccccacgacgccgaccgagcctacatcctactctacgcgcgcgaggacacgaccgccgagtacggtatcctaacactcaagaccaccgtcccgctcgaactcccctggaagtcgaacgtaccacgctccgacgacttcgaccacctggcagtcctcgagatcccctgcaaaccgagctcgctagcacgatcacgcggtagggtgctcctcgtcaacgccccgaacgcgtacgtcatcgccatcacctaccacctgggggacaagtacgaggcacacgctccagacggcgagaaaatcaccctcacgagcaaggacctcccacactaccacaacgcgaacatcctccgagagaccatcgactccgaggagcacgggttaccacccgaactctggcacgagggcgtagcctaccactggctccccgtacccgggacagtactccacgtgcaaatccccttctacctcgcgccgaaggacgccgagaacgcgatcaaggtcgagaacgacctgaagatccaactccccgaggggaccaaggccgtctacctcctctacatcgcgaccgaccaacgcgaccccaaggaccgccccgcgagcaagtaccacctcgagatcaccctcgacgacgggcggaccgtccaagccatcgtactactacccgattatctagcgctcactcgggacccgagtacggccctactagccatggactacgcgcgcacgaaccccacgggcttaatcctcatcacccaacgacccgcctggcacctcccggtactactcaaggacgaccaacccgaggaggcgcacgcgtacgcctgggtcctaacgatcgcgacgggcgaggagcacacgatccgcgagctcaccctccacccacccgagaccggccgactctacctcctggcgatcacggcacaggcgaaggacgctagactatacgccgtcctcgggccgggacagtgggtcgagttgagcccgcccggggaggtctggcacggtcacacggtggacgtcgtccacccgggtgagactcgagagcagttgccgatcgaggcatggcaccggcgggtcctcgtcaagaccccggacgaggcgatacccctgctcctagcccgcccggacggtccgaacgcgaccccgatcgcgacccgagagtcgactcttaacataatcctacccaaacccgcggacgccgtgtacttgctgtacctagcgaccgattacgaggaggcgagcacgccgcccacgctacccctactcgccctcctcgacgatgggaaactaaccgggacactcgtccggatcgctcccgcggatcggaagccctcggacctcctacccgccctcgcctgggccgaaccactcgtcgaggagggtgaggacctcaccgtccgacaggcacccgtcatcacgtgggatcgcgtgtataagcccacggggacggtagtgctcgagggtcggaccgcctggctgctcgagctcaagcccgagcacgggaggatcaaggccctgaccttcctgcccaccgacacgcggctcacggtgtacctcctcgccgtgaccctccgcattggagattactactacgcgctcgagggcgggaagaccatccgcccactggacgcgggtgaggccgatactacaatcgagaccgcttggaagcccgagcgcgcgcccgaactgccgaggacgttctcatggcccgggttctcggtggacccggccgagaaaccctacgattatcgtcatcacgtgcgcgtgctcgaggacgaggtcgtgatcaccctcggggacgagccggtaccggtgcggctgacgggtaggctggcgcccgtggtacgccgggaggtcgaactacccgagcccgcggacgcggtctacctgctttacctgaccgggcacgctccgtccacttcgccggcccgactcctcgtcgagtacgaggacggtggcagggcgctcgtcctcgtcaatctagcgagcgaggtgggattgtacgagagtccggctcgaaccgtgagtgcgtgggttaggcccgtcctcggttggcacaacggggcgcctacagtggtccaacagcccgcgctcgagctcgaacgcgatgatggtaagagagtacgcgcttggttcctcaaggtccaagcaccacccggtcagaggatcaagaagctcgtcctcctagaccgaccaccacgagcccgagcctggctcctaggactaacgtaccgggttgggagtgaatactacgcgctgttagaaccgggtaaaggcgagttattggacgagctcaaggtgagggttaagctcggtgaccaggcgatcgacctcaccgagcctagcctattgctaatccacacgacccgagaagacttagaatactcgatcatcgacttgagaaacccggtattacccccggagtggaagcgagcaccaccggttagtgaggtcaccgtggagtacggtcctagaatactgcgcactgtcaagctagaaggcgagtcctacctagcggtattatgcctaccacccgggttcgagtactccccagaggactttaccaaatgggcccaagcactagccgagctcaaggatagggttaaacaagatgagaaagatgagaaattagccctagtagtgctaacgagctcactaccgatcctcgaagcttattactacgatcaggtgataagcaagctctgtgaggattacaaggcgagttgggttaggatattacccggtgtgatcatcgcgcaggttacgatcgagaaacggagtgataacaaagtccgactgggactctccctggacacgcctaccgtcctactcggggttgaattttacgcggacccggtgacacaacgagcactcaacactagggcttcgatactaacacaagtcattgagaactatgtagtttccaaaatcaccggagaaccgtactatagtgaggaagaatgggctttattacctgataatgttagacaagatttggagaaaatactgaaggagctaggagtagaaccacacggggagactaacaaacaatcctcaatacaagaactgatagaaggagaaataccagaatacaacccaacaacaggaacgatagaaatagaggtagaaaagaagaaaggagtagcaggtgttgcgttatggttgatatctacgtggctttccttaatcgatgtcgcttcaagtcctcctcatgagtggtgggaatggttccttttaggtttaagtatgggggttattggttggcttggaacaatccatattggatttgcaattatttcaattgggatttctatattcatcatatggtacgaatatcgcgaatacggttctactccatccccgtttggatgggctagtttagcaatatccatcgggtcgactattaaggatatcatgaagatgttataaatgatatattataatgacgccactggtagtgctttgggtggtgttctcatgagcgttcgaaccgtgtcactgctcacgttgttgttactgattgcaccggtggcagctgatatcccacctcacgcctccgagaaggagctggaggatccgaactggtggtgggaacatcatcggggacccgtttgggcgacccggtacccggaagtctggaacaagatcgtgctcaagtacgaggatccggaagatcgggagaaggtctcgaagttaggagaggcactccgtcatcccccgagagggtttgagctttggatatggttcatactggggatggcgttagtgctaccgcctgcctcgcgagtcggatttcttaagttctttaagtacaagacgtgggaggctcctgagtggctgatccaatactgtgggacgataatcctgagtatggcctacctcgcgatcatcgcgatgggtagggcttacgtcctcaattgttccgtgtactacgtgatgatcgggaagctcagtgaggcttaccggacgttttacctatggacggcgtacgccgagccgttccttctagcattcaacgcggctataccgttgatcctagtgtccaagctcgagttgccgtaccgtcggcttaaggcgggtatcctgatcgcgtggctggcgtctctggtgctgaacgttcacatgcactccgaaagtctcacactgttatcgaccctcgggggatgatggttgggccactcggtagttctagcactatcgatcatcttcgtcgtcgcgctgtgcccatgccatgcggggtcgtggagcgtcgatcccgagatcgtcgagcatccgtggttgtggaaccggtacgtggtcagtaagtaccacgatccggtcgaacggtcgaaggtggtcggtctccgagaggagctgctggattaccggaaggcgcgcgtgacggtggtattcctgtgtacgggcgtttgggtcatcgggatcgcactcctactggtgaagaacaggagggcccccaaggaagcgttaacggaacacttcttccggttggcgtccccactgggcttcgccggtctcgccatcgttatagcatcgattggggagttcaacgcactcctcgctctgtccaagggtgagggttatcgggttgcggtcgagacgatccgcgcgtacggcgtgtacgggcccgcggtgatcgccctattagcgatcgccgtaatactcgtgacggtatcccggcgtgctccgaaggtcgacctacccttcctacccaagacgggcttacccctcagcagggtatcggccatcatagcctggacgtcggtactactcacgtccgcgctcataatctcgtacaccgtagaactgttctcaaggtagatcgcgcgatagactgcgacggatgacgacagggggtgggatcatcggtggtcgacgggcatcccgtcgggttaagaggccgtgggattggtacgagagggctaacttaacgacgtacgttatcgtcggcatgatgttcgcgatcctgatcgcgtgtaactggcgggaattcgcgcctctcacccctatggccgtgggattcttcctcgcggcattgtggatagtcggtactaggacacacccgaatccaggagatctgaggcgtcttgacttgcgtacggtctattatcgcacggcctcagcctgtcacccggactggtactgaccgcgctcgcggtacccgtgatcgtggtcataaccgccgcgatatcactccaaccgaaggcttctcacgccacgctcgctgctaccgagttccttatactaatcctcgccctcagcgccgtgaactacgtcctcttaccgttgttgggtttcggtgccgtctgggtcttcagggtgggaaagaggctctacctggtctccctcgggtactgcgagggtgagacgatcctcgagccgggtgtggaggtcgaactctcggggttccaggtcctcgcggagttccccctggagtcggagtaccacggtcgattgtggatcaggatcgggtacttcccaccggggatccactgggtcgagttacccgagcgcggtttcttcttcctccgaacccggggcgtgtgtgcgctgcgggacccgtacctgccccgggacgacgagggagccctcgagatggcccgcttcctggagaaactctcgatggtgtacgcggccgtgtgcttagaggaagggggcccgaaccccgggcgcgcgcggaagatcatgaaacacgtgaagaacaactccaggtggggaacgacggtgaggtacttcggggtcaaggtgccgctcgggcggttcaccaccagtcagtcgaccaccgtaacggtggccgtattggtggccctctcgctggtgtcggcactcgcgaggggtgagccgctggggccgatgggcgcaccgatcctcgtcctttcctggctgttggcatgcgtgctgctggccctaccggtggcctggcgcaacaggagggcggtcaagaccggacgctggtaccgggtgatcttcgagcgccaccgcgtggaagaggctatcgacaaggcacgggactggaactggttccccgacctcgagagggtcgacccactagaggattgatcacgacccgaggccctcgtctcggcacaactggagggtcaagaccctgtttgaccccctcccttccccctccgaagcccgaggtcccgcttcgcagacccttcgagagagccacaaaccagcggagccgggggcgctccacgctacggtggaggtgccggcgcgtggccgcacaccagttgttcgatttgaattccctttgcggtgagtatggaggggttccgcttgggtcgggtggtgcgaggactcctcatggcggcgtacgtcggcctctcactcgcgataacctggccgttcgcgtggcgcttctttcggtggtgcgccccctacgccccggccgcgtacacggtgtccgagctggtgatgatggtcgggacgtgcgggattctgcggtccgcgatccccttggcggcggtgggttggggcgacgtactcaacgtcgcggtagtggcgatctgcgcgtcttacatccccttctgcgtgtgctggatcgtcttccgcgtctacctgcactgctgcgggactgcgctccccgacggcggttctctcatgaccgtcctcggcgcggtcctgctctcgaccacctcgttccaggtcctgtggaggcccgaagggcgctgcggaagctgcacggtgaggtggacgtcggccgggacgtgaggctgttcctcgcgggcttcgccgccatgatggtcaccgcgacgctcgcggccgtctacacggtcctccacgcgccgccgcaacgggtggcgggtctggccggttccgatatcgtgtgcatcctccgtccccgctgacggatccgcggccccgagcccgcgctcgggtggtacgggcgggcctaccgggcagcccttactactcctttcctttccgtattctaattgaagcaccgggtccgccggttccccgatcccatgagatcgagggtgaccgacggcggggaagcggcgttgcgcggcctaacgcggttcgcggagcggagacttcgatggtacaggcgggcctactggacgctctgcccggccgtcgtcctcttcacgggtttggggtgggaagaggcggggctattgctgatgggtttcgcggccttcgcgggggcgttctacgggatctaccgggaggaaactgagggaacgttcccccgatccgagcactcacgccgggtcggtcgcaccctgatgtggtaccccaccgcctcgttcgaccgcgtgctgggaggcctcaccccgactaccttcctgccactgtttcccgccctcctctacttcatcacttcggtcgcccgtcaccccgactttctccactctcgaatcgcggtagccctcttcttcctcggccctctgccagtcctactctacctggtacggtacgaggtcgcttcggccctcggttgcgtccgggtcctccgcgttcgcggttcccgggccctcctcctctccctcgggtactgcgaggccgagttggttacggatggaaacgtgaaggtttccgggtttcgtgagctcggttcttacccggtcgagtacgggggcttacccggggacccgcccggggacttgaggatccgcgttggttacttcccgccggggaagcacgaggtcgaggtccgggattgtgacttcctcttcctcaggacccggggcgtgtgcatgctctacgactcccgtggactgccggaggaccgggagggggcgttccacctagcccggtggtgggagaagttctcgatggcgtacgcggccctgtgcctgaaggagggcggaccgccggatccgggtgaggccgaggccctggccgcgggagccggtgacaacgcccgccgggccctgaccgtgacctacttcggggtcaagttcccggtcgggaagctggtcgcgagcgaggaggccatgttaggggtcgtcctcgggatgatcccgatagcgaccctggtgcgcgatctcctcccgcccgacctgtcgctgctatccgcaccgatcgccgcaccgctcgccggggtactcctcgcgttacccatcgcctggcgcaaccgacgggtggtcaggaccgggcggtggtaccgtctcctactccgaggggatcatgtggagaagctgctccccagactgttgggggaagatttgtggtcccggcggggtgggatgatcacgaccctgtggaaggtgttcgacgtcctcgagcgggagcgtcgacaacatccaccgtactgacctacacctggtggtactcagaaccacgtcccgagtcgttccgatttctagcccatggagtcgacgtcacgggggaggagtaacgcaagggagatccgacgtgtttttccgaaacgaaaagtcttaaattccgtcgagtagatgcctactgggagggggtcgggacgttccggtccgccgtccggttcgtcctggtgcccctcttcgtcccggctccggcgtgggacggcactggacccgggtgcaaacgatcccgcggaagccgtcgcggacgatgatccggccgccgaggtcgtgggtggtatcacgccgtcgcctcgctggcgaccgggtacgcgatgcaggtggccctcgagaagtcgccgaaccccaccatggccgtactggcgtctgggatcagcgctctaagcctggtcggggcctccatagctcgcgatgcgcacctccacccccgacgaccggaaactgagggactgcaccgccgaggtcggggtgctgagcgttctgggtaggatcgtggtgagtcaccgcctcctcgagtccctcgggtccgacgaccgggattacctacgttacctacgatgtgcgctgatatccgatctcgtggcgtgcgttagcctcctgggtgtgctcgagatctacgctttctctctcaccgtgagtccggcggccatcccggtggccatccccgcgatcctcctcctggccggcatgacgtacctgttgaagaccttgctggagtcctccccgctcgccggcgtggtggacaggataacgtatcacatgtgtatcctgtcggcgggaacttgcgaccccgtcatctcgatgcaattgcagcccccgggcgatctaatggacatcccgccgtacgcgttcggcctcgtgtacggtctcacggttttagcacccatcatcctactctttgggaccttgatgcccgcgggagcggtgctggagccgttcgaatacccgttggaggactctccgatcccgggtctgatcctagtggcggacatcgtccggccgttcacgctatgcacggtgatactcgacgtcctgtcggaggtgttatcggcggtcctcttaccgggtgaagtcgtcaggaaggcggtggccgccctcggccggtcggtgatgagcctgttaggcatcggtccctcgggtgagggagcccgagcggaacccgccggtggatccggggcgccgagggcgtccctcaacgctcaccggtactccctttggaaccccctccaaataaccctctaagccgatccggacgtcggggggtcgtaccgtggggtgtctcccgaccgtgctcgccgccttagcggccatcttcgtcgtgggaggggtcgcgacggcgaccgatgacacctatccccatcattatgtcaagtttcggatcgagccgaagatacagtccgtggaggtaccgtccgaggtcgtagcggagggtgggaccgccgaggtacccgtgaaagttacggtcacctggactggcaattacccgtgcacgatcaagcgcacaccgaccaggatgacgttcgcggtcgacgggaacgtggtgaacacgcagatgatcaccccaccgtacaaggtcggggacaccaggacggtgagcacgaccctgaggctcacgccgggcgagcacgagatcacggtgacggtgaggttcccgaacctctgcagtacgggatcgccggtggaaccgacacgaagagcgtcagggtcgtcgtaagggtcggaacgtcacgatccgggcacgaggtgtcggaacggcaggaggaacgattgggagaggagcggcaggatcagggccagcgggagggacaatcgtgtgagaagagggggaaggagagggagaagaagaggggcaaactacccgtcctcccacctccggtgatcccgaggaggcgacgcccgtaacggggacgaactcgagacgcgacatctcaacggcccacctcccctaccccgcctcgacgtccgtcggcgtcgcgggcgacgtccccggctcgcctcgagatcacgccccggatgcacgctcggtgagcccgacagcggggacgtcctcgccatctagggttggttccctcggtcggatctggaacctcgatcacccgagacggttgctcatcactcgatcgtcggtgaccgagcccgtcacggacgttgggctcatccgctaccagtccgacttgacatcccgaacggtggtgttactgtagtccgacgatcgtacgtgaactatgcacaaactatgtgacattagcatgagcattagtcgacgatcgtacgtagatgttcttactcgcgtcgcccgtgccggagtttccagcgctctaactcgaactccacgtcggggatctcgtgtttcccatctaatgactccctcctggagcggatgaccttcctcaagtgactcgagtagtgggcgggccagctcccgagggccctgatcaggaaggattccaaccggtcgggtagcttctccaacacgtcccggatccgcggtgagtcggagggtctggcgtcgaaggtcagggcgagcccacgagccaacacccgtcgagcccgtttgtatggcaggtccgagacttcggtgagcagggtcttgagcaccgagcggaggttacgcatcaaatgccgggctagttcgaggacttcctcacgatctaaagaaaccagccactcgacgaaggaaacactctcgttctcgggtttacccaggtagagggtgcgcccgtgctcgaacttcgaatcccgcctccacctcgcgacgtagtacggaccgcaggtactaccgttgaccgtccggtaggtcacctccagactcggcttcttcctccggcggtatacttcccggagtacccgaagggctcggatgcgctcgacaggatcatggggtatcgggacgtgcgatgtgaccaaccccgcacacgaccccctcaggtgcccccaaattgtatggaagtaggaggagaacattctcgagatataagcgttatcatccgggactgggatccgcctggggaagcgcgcgtcctcctttcccatacattcggtcgagacggcgtgcaccggcggagcccgggatgatcaccggagatcgtcctaaggttacgggagaactacagtgaagggggacggacagaattacccagtaatgtagggacgtctatttcgatgggttgtagacgcataacgtggataggagccgacggtgcggtggttcgccttccagtaaacactcatagacgcggcccgaacgcaccgccctccgattgagcagcaacccgcacaacaccggtagggccagcagacagagggtgaacgcgtcgaggacgaccatcgcgtcgagcgcgccccaacctctaacgcctctagtgagcacgaagtccaccgcctccgtcatcgggaggagggagaggactaggacgcacatctcgacaacgggtaggttgaagtcgcagttcatgtaccgcacgaggaacccgacggctcgattgttcctcacacgctccaaccacctctcgagctccacggcgccgggtacgccctcccgtaaacacaacgccgcgtacgccatcgagaacttctcccaccaccgggctaggtggaacgccccctcccggtcctccggcagtccacgggagtcgtagagcatgcacacgccccgggtcctgaggaagaggaagtcacaatcccggacctcgacctcgtgcttccccggcgggaagtaaccaacgcggatcctcaagtccccgggcgggtccccgggtaagcccccgtactcgaccgggtaagaaccgagctcacgaaacccggaaaccttcacgtttccatccgtaaccaactcggcctcgcagtacccgagagacgccagtgacacccgcgtgccctcgggcttgacgcgtacgggtagcgcgtacccgagcgtcatggccgccgagagtttgaccaggtaggagaacacggtcgtcgccgcgatggatatgagcaggaagaccgtgagcgcgacgcccgtcctatcccccgtcgataaccacatcgtgaagaacagtatcaaggcagggatcatcgccagcgggagcgccgtccccagcttggggccgtcgcggagcctgttgaaggaggccgtgggatagagtagtcgggtcccgatcctagcgtgctcgggtttcggcgccctctcgcggaatgaaaagggcctcattagtccgaggagaacgcctacgatactacccaaacccgccaccatcacgccggcgtccgacccgaggagccccaagggcgccgagagggtgcagagcgcaccgtacgccagcctcaagcgcgagacggtttcccgactcaccaacggaagctcacagccggaggcccccggatcgcccaagggaacgagcccccggccggacctccttcgtgaagggagtctgggcacgttgaacgatcgtccggggggactccgatttcagcgggcatgaggggagacagcacctgtggccgtcgtcgacgtgttcacgctacgcacaatggtacggttatataatcggtccggtgttcgtccgcgtccgtgcgcggcgtcacgagaccgacgccgtgcgggggatctcgcccgtggcggaccttcctgcggttggtctgtggcgatccccggttgcgggagatcgtgttggagtttcgggattccgtgagggtcgggtcgagtcgggtgggcggcgtcctccggaagctctaccccatcctctcactgtacgtaatattgagcctggtcttcgagggtcgtggggtcgttcgggtactgtgggatcgggcgtcggccccgctcgcgatgatcgtgatcgccggcgcgtgcatcgccccaatcctcgccgcgtacctggccttccacgggtatctcacgctcgaggcccgcaggaggcttcgagctcccgtcgtcacccgaccgcacaacccgacgctcctcttgctacccttcctcctagccctgctccgccctgattactacgttcaccactggccggagacccgggtcgccctagcctacctctacgcgggatgcgccctctcccccaccctcgcgctcgccgtgatgtgggtgttgagaacgcgagtcgtctggtgttggaagagggacctggacgaggaagtgttagaacgcttcgtcgaggggctccccgacggacggtacgtacccggcagtctgatcccctacgcgtctaacgtcgggacgctcgccgtcgccatcgccgtcgacgcgccgtccctcacgccctatctgatcaccgccggtacgctctccgtgctagccctcacgacctacatctcgacgttcaccgagggggatctcctcgacatcctcggcaagctccggagcggaccatggcgcgatgactcgtacgtgatcggcttcacgatcctcatcctggagaggagcttctggctgataatcgagcactcgcacccctagaggttcgacgtcacgtccggtgagtggcggtggctacgtccggctagccgacccccaccttgatccaccggagtgttaaatacggggggagacaccatcggatcgtcacggggatcccggtggagcgggcgatcgcccgtgtttgtggggatccgagggtcgcggggggtcgtctcggagttcgagggttctctgaagcgcgagcccgaccggtggtggttcacgaggttcctccacgagcacccgatgctactctcgacctcgctcgcactcctcaccctacccccggtcctcacggcgggtaggacggtctgggaactgtccgaccgcccccacgatcccgcagcccttctcgtgacgacgtcggcgaccctcgcccccgcgctcgccgtctactccgccctcatggcgtactacaccctccgagcccggtacctgatcagggcaccggtggtcacctacccccaccacccggcctacctgcccctgctgtactggctcccctcctcccggttactgacccactggggcgagccgaaggtgcggttggggttcgtggtcctgtacacgacggtggtactcctacccaccctctcgctcctcctgacgtggatctgtcgggttcggatactctggtgctggcgtggggacatcgacgagggcacgctggcgcgcctgctcgagcgactaccccgggactacacgtacgcccccgggtgcgtgttccccgccttggtggcgatcagcgccttacccggggctttcgggtaccttctgttgaaggggacgtggtcggggtggtacgtgctcgcgatccccgcgagcatgatcgtgccgatgaccgtcctgacatacgccgtgatccggaagatgagtcggtctcccgtcgaagagctgacggacgagtggttgggtgaggggaacgctccctggcggctcgatctgcaggctctggccatcctcgcgacgttcgcgacctggacgctggtggacgtgggaggcatgaggtgaccctcccgcggggacccaggacgacgctgaggcgatttaccggaggcgtaaccccgtgagtttcgagtcggactcttgcggcgaggtgtcagaataagtgtctcgaagattcatcgtattagtagcttgtatattggcatacttaagtttgtacctgctagaattgacactatatcccccaaatgctgtacccatagcaataattgtattcattcttagtattgccatagaagagctagttcgtaggtggtatatatattacttaggttggagattccgaagcctgagaacgctagaatgaaaggtaaagtaatccatatccgaccgtgttctccgctcgacaactcacacaacccctccatgttctaccatctatcattttaatgtacctccccattgtttcaattccacatgcggaactcaccgacagcagtgtattcttaactttcctaatgatcgtcctaggagtagtatttgtagtgtccatttcgatgtttttgtcttttccgttcgcgatgattttgagggttaaagattctagagtttggatcctctcgtggttgtactgcgagactgagttgataacggatggtagcatcgaagtctctggattccgagagtttacctcttatccagtcgagtacgaggatttacccgcgggatcaccaagggatttgatggtcctaatcgggtatttcaaacccgaattacatcgtattgaaatccgagattgtaactttttcttcttgagaacgaggagtttttgcttactctacgatgcctgtcttcccggggatcgggaggaggcgttccggctcgctcgatggtgggagaggttctcgatggtgtacgaggcgctgttcgaggatgaaatcccggatgagaagaatatcatgaagtatctggacggactgtaccagttcaaggccgctcactactacgtgcccctgccgaggtggccctacgatgaagaccgcgacgctcgagattaaaactcggcaccgggggtgcgtcgcgtgatccccggatggtacgtgggagccgtcctggtaccgcagctggtcgtcacggtcgtgatcgcgcatggcttctcgcggaagcgtaggtgggaacgactgcttagacgtgcctcccgggaggaggtgaggaggtcccttgagcggacccccggtggtggaacggtccggctggccttcgtgcccgagctgctgtggtgcgttcccgggagagtgctcgttctcgggtcgaccggctggttgatgctcgcggtgctgtacgagttcgagctgctcgggctcactaggatcgtgcccgaagctaaggtgcgagggctgctcgctgccgtcctagcgctcgtgtacggaacctgcgccgtcgccgtgttacctgggacgcccaggcccgcccttccgaggctgctggcacccgccgccgtcggtggcgccctgggggcggtagcggtcctgaagtcgctaccgccgtggttgggatcgctcgcgccggtcgcgatgctagtcggtctgtcatccgtgatcggatacagggggaggctgagtgcctcgggaggtacggcctgggatgaggtcgttgaggcggtgcggtactaccctgtttcggcgctctccgtgggggaaagggaggcagaggcggccgagaagtgtgccctttggttccttgcctgccgggtggtggaaggcacgagatcggtggggtgacgctggcctccttatcgcatggagtctaccgtttcctgtcgctccattttcccgcccgatgccaaagtagtacgaccccagaaggcgcggcggtttggctcgagttctggataccaactcactcggcgccgggttgaatcgttggtggggatagtgccggtcatgtactcgtggtggtccgaaggatcgtccagggagcgacgacctacgtgctcaccgcgaccacgctccgttatccaatcctcccaccgatcacggagactgctacggctgggaccggacacatccgactcacgttccgtgccggagtttccagcgttcgagttctaacatgacgtcgggtacttcgtgttttccgtcgagggatctctttctaaaacggatgatcttgttcaagtgagcggagtagtgtgcgggccagcctccgagggttctcacggcgaaggattcgagccggtcgggaagttcttctaggaggtcgcggatttgcggtgagttcgagggtctggcgttgaaggttagggcgagcccgcgggctagtacccgtcgggcctgtttgtatggcaggctcgagacctcggtgagtagggtcttgagtaccgagcggaggttgcgcatgaggtgtcgcgcgagctccagaacctctgctcgatttaaggaaaccagccactcgacgaaccggacactctcgttctcgggtttgcccaggtagagcgtgcgcccgcacttgtgtcgggagtcgcgacgccatctcgcgacgtagtaaggaccgcacgtgctaccgttcaccgtccgataggtcacctcgaggctcggcctcttcccacgactgtacacctcccgtagtacccggagggctcggatccgctccacgggatccgagggtatcgggacgtgagcgtgcgactcgaccaaccccggcacgcgatcccctcaggtgcctccaaattgtatgggaaagattaggacaacgctccgagatataagccttacagtccggaaccgtgactcggatgccgatatttcccggggatacaccgaatgcgagccgaaccgcgtggacctgtatctttccatacaactgctcgatcggatgccgtccggccgaggtgagatttccccgaggatcgcgtggtcggagtggtgggttaagggctatcggatcgttattttcagaaaaaatagtaccgcgcccgcgagcgggatccggggacatcggcatgagatacctcgtggctgcggtcgtcgcaaccctcctggccgcgttgacgccggctctcgggtattggcacccgagtagtggctatccccccgtggtacgggcaccatcaagggtacggtcaccacggtccgaacggtggtccgaacggtcaaggtggacgaggactggggcccgaggaatgtccctacggtcacccgaagtgtcccagcaactcgcctgcgacggacatgagcggtgtgaacgtgagctcgtacggtggtaacaccaccggaacagaggcccgtaccgaggttcccgtgagtccgggtagcccgagccgaacggtccgagcatcgacgggggtcgtctcggacgtcaagaacctggcctacgcgagctggcctgtactgtcgctgttagggctgctcatcgcgccgacgctagtcagacggtgaacgccacaccgacggcgtacccaccctatttggcggatggatggagctgtttcatcgtcgggcggagaccaacagcccgactccgatcaccgcggagatcacggcgagggccaccggcacggtcggagttccggtcttgtactcgcctacgacggtccctctcatgctctccttctcctcgaacggaaccggtccttcctccccgttcctcgcgtagacgtagatggtatccccgtccaccaccttggccacgtgggccttgaactcccgggggaaccacctcgggagcgggtcgggctcggggtactgccggtactcggcgagctttctctcgacgagcagctccgagagtgtcgtctcctcgtcgtcggggtagacgtcggcgatgatccggtggtacttgccgagaccgtacgcccggcacttcacgtagccgccggcgtcgcggatcttcttctcgacgaactctttggccttcagcccgagccggtactcctcctcgctggaggggtggtagatctccggggcgttgaccctggcgaagcggatcttgacggcgggtttcccgtcgaagtacgccaccggcactcccaggttctccagctccctgagctgctcgtccgtgaggttcagccaggggacgccgcttccgggcgcgggctccggttcctcggggtcgacccagggcggggctccctgggtcgtccgtcccggagagcgctaggagggtcgccagggccacgagcagggcactgacgaccttccgcaagacgctccccccagtacatcggcgcgtcggcgatcccacggttcataaggttactttattcagggttagggttgaggtcgtggattcccccgacctatcggcacggctgaacggtcccgccgcctagaccgtcgacgtcatcccgagggctcggacggcctctcaagcctcgaacctcgttccacgtcgccctcctcgaggatctcagtagccgactcctccagctcgtcacccctcagcgtctcgccgtcgatagtcactacctgagacccggacaccgtcctcagccctagtcgacggatcctctccgcgatgatagcgttcaccacccaatcgcgcctttcgaggcacctcaaacccacctcggcggccggtaccaacgtcccgtacagtacctcaccggtcagcgggacacccaccgccacacggtccgcgtgcgtcgaagggtcccggacgatgtgcacccggccgtcccggtcggtgaccctcacgttcacggcgtagtatcccagcctgagtaggacgttaccgacgatcccggagattacctcgtccgcccgtccctcgtcctcccggatgagatctctcgcaccctctgcgatcgtctcgaccgtcgatctcacggtctcgagcgtccccctcacggcgccgtccttcagcgccagcacgcccaccgccaccacatcgtacgggtcgctaccgtggaggatcctcaccgcacccttgtcggacaggtactccgtgatcctcgccgccctcgacgccacggtccaggggtccttcgtgctctccacgatcccggcgatcagtcccttcagctcgaccctactgtactcccccgacaccgggagggtgaggggcggttccacccacggttcggcgccttcggggaccaccggctcgacgccctccgccatcctccgtacgagtcggaccccggcctcgaacagcccgtccaaccacaccaggaacccggcgagggacgcggcgtcgcccttcatgagcgttgtcttcgggtcgaactccagcctccctccgtttccctcgaccacgatcccgtcgacgacgaacctgatcgtcgccaaaggtgtgacccctcgccgctcacgcgctcttcagtcgggatgcgaggaccggctcaccggcccacgacctcactccccagcacgtacgtcacgaccgtctggttgtgctggacgaacttacccgagggggtcagtccgtactcgccgtagcagttgaacccgaagatgggcacgtcctcgctcaccaggtcccggagtaggtctacggcgtcgtccgtgtcgacgatcaggtgtcgggccatgcagttgaacacgagcacggcgcccagctcatcgggcgagccggcgtcctccagcgcccgctgcaccgccctcttgaacgaatcctctacgtcgcccggctccatcacccggacggcgacgccgctcgggagctgtgccaccagcttcaaggttctctcttcctcgtccacctcgaacggggtcctgatcaggtggtacggacgcggacccggatcctcgacccccaaggggtacttcagtagcgtttccatcccgatttcctcacctacgacctcctcgtacacgtccagcgcgggttcgccgtccatcctgatcacgtccacaccctcggtctccacgatcatcggctcggaggaagggacgaaaccgtggtcgaccgcgtgcccacgtttcacggacgagtacagaatcagcaccgccagcgcgtcctcgtacacgcccgagtcgtcgaagatgtacgtgcgctcgaactcgtactcgtccgccgtcataccgccgacgattcggggcaccgtgcccaggcagtccagcacgcccctgagtgcctccatcaacgcctccgggtggttcaaacagcacagatcgtcggtgaagagtagagcgtcgaccagcgagtgacgggtcacgtccacgttaccggtcacgagtttggtcgccaccggtgccagtgaggcggagacgtccacttccacgctcttggcggcctcggttaccgtctccctcgcgaccctgtacgggtcctccgataagcccgtgccgatcgccattcccatggctacgagcttggagagttccatcgcgaggatagccacggacccgtcgctgaacccgtccgtggtgatgttgccggcggacgagagaccgaggatcagacacctgtcatcttcgaggtactccactatcgcctcgcgaacctcgtgggggtcgtgcctaggcgagaaggcgcagaggacggcatcgattctatcgagaccccaatccgcggccccctccagcgcctcctcgggactggacttggagacaccgacaccggctttcagcggagcggccatccttcactcccccttccgtaaagtaacagaggtgataaatcgtaatcggatgcgtatgcacggtcgacaaatacttgacaacagttttccaacgttggctcgtgttgttatacattataaaagttacgctagtagaggctgacgcatggtacgtggctcctataaggtgatgacgtcatgctgtccaacgttatgtacccgacgaattcgcgggtgaggccgcgggaatcccgacggtaggatgctcgcactcgggtgcggtgggcacacggcgtgatcgggagggggaggtgcggacgccgggccggcgcttaggacgttcacacacgctccagcacgaagatacacctatcctcctcggccctcatctcgaccagccgatactcggcgttgaaggtttcctccgcgagctccaggatcgtcgctacgtaggggcacacgaccggcacctcgtcccggtccaggagctcacggcgcacctcctcgaacggacacgactcgatcacgacctcgagcctgtcctcggacccctccacgcgtacctccgcgtcgtccgcgtgcctgagcgcttcctcgatgtcgtcggagagggagtccctgtccccaccggacaccttcagaagtctcgagcagctcgagcatacgtcggcccgcgatccggttcagtgcgagtgccgcttcaccgtgcgtctcgaagagcgcctcctggagacctatcatgaacgccaaccagacgtcccaacgcaccaacccggttccccgcgccggcgacgggcgaccgacctttgaagtttgcagaggaaaaaacgaacactgttccaatatcgtggaaacgttcccaggagaaccgaaacgcacgcccctcgggcgtcccgaacgagacgacaaccgacgcgaccgtcctcgcccccgacgttcacggtccgccgaagcgctgacgtgtcgcggggctcacatcccggaatccgagcgtcccgcgtgtggaaggggcatcaccgggcactctataacggatcccctcatcacgctgatcccgatcaggaggtgccgggtttgagacggaccgccgtcctgctcgtccccgagccgaccggaaccggtgtcctcgagacgctcgtcaagtggttcaggagagtggatatcgaccggtagtctggcgcggaagctggcggaacccgagggcaccggtgtatcggggttgctgagagggttagggcggaagggtgggggcgaggtcgtcatctgtaggttcgtaccccaccgaccgagaccctgccgtacgagagggtgctgcgggggatcgaggcggagctccgggaggagttcgaggtccggagtccgtcggacggggtccggacgccgtctggaacgtctcggacctggtggtggaagccctatggagctcgggtctagtctacgtggacgtgtccggcgcccgaggaccggagatcgcgggtatcccgctcggactggcggccctcgaggtgccgggcttgagcgtcggaggcgggagggaggtgcggttcgtcgctgggaggctggaggacgacgtcctgaccgacgtaacggaacacttcggggcggccggcgcgctgatatggacgattatctgctcctggaaaccgtcgcccgaggccgctagaagggcgatcgagccggccgagcgtgccggcgtggacgtccgggagctcgatcggttaggggaatacgtcgacgccctcgacacggcccaggtcggtgaggtactggccgggacgaggccggatcgggagacgatccggaccatcgttaggatcctgcgtagagtgctgcatagagtgtacgcgacggacgggcgattcgcgccgcctacggcgagcccgttaagcggtataatccgggtacactcggacaccccgacaccgacgacgtgcggtgcggtcacgtccccacgggaacccggtacgtgacggtacgtcccgaaacggttatctttcgatcgagtgcgcggacagaccggggcccctctcccttgagggtcgggatcgccgtcctggccgcgctcctcgcgacgttgggtgccgcaacggcggcggagtatcccattaagggcgaagtgacgggaacgttcgaagtacacgtcgaggcggatccgggcacgcaggtggacaccaacgagtacgccgtcgtggtcgggagtaagtacgtctacctgatcatggtggaggaggacgacctgcaggattcgggtaagttcaagacgcagccgttcctggtgcccgtgcccgcggacaaggtcgaagtcaacggatccctggtgaagttcccggacggtctcgacgacacgttcgcggcgtactgcctgaacccgatggggcgccacccacgaggtgagatggtagtaccgaagtggaacgagatcgaggacaggttcgtcgagatcaaggtggtggcgggtcacggacaggtacgtaccgaggagcggcatctcgctccggagtggatcaaggctgtctgtaagcgcgtggagggtgtcgtggatccgggagagtggaagcgcgacgcccagacgattatctgggtgacggaggccgcggtcccggagaacgtgcaggtgaacgtcgagaaccgcgttcaaatcgacgtgaacgcgacggtacaggtgaacgcgcaggacttcttccagatcaacgagagtgagctgagagagctcgcgaacgcgggggatgagatggcacggcagctgctcgagttcttcagcaacaaggaggagttggagaacctagttaacaccgcgcagagcgcgctggacttcgtcaagcagcacctaagtgacatcgtgacgacggctcagacggcgaaggaggcgtacgagacagcgaagagtgtcttcgggaagatccccgtctcaccggcggtgatcatcgtggcactggcggcgctagcgatcttcagacgccgcccgtaaatcataacgccccgttcccgcccgcacgtatcgtcatgggaatcgaaacgatacgacgacctcatcacgagctcaccgccgacgggtgtcaacagttaactcggaattaacacgtcgggacgggcgggagaaactcgaaccccgattcccccgagaacggcgacctggtgtggaacgccctcggttctgacctcaagatgatgaaggcggacttaaccgaaccgacatcctccctgcctccgagggatgaggctcgcggggtcccgtcgtaagacccgctcgacgcggctcctcggcgaccttcacacgggaaacggcgagccgtgggacggaacccgcgccgaaattacgcaaacaccgcgtggggcgtggagacggcgggccgcccccggtccgtgaaacgttaacagaatgttaacgaataaaaagactgttgacgacctggggcgccgtgtcgtacgcgcgtcacacctccacgtcggccaccttgcgcctacgatagaacctgccggacgcgtgggtttccgacatcctacggggttccgacgagaacacgatctcgaggagctccaaggccttgtccacgggcttcaggctcagggctttcccgacgatcctcgtgacatcctccacggagtatccccggaggatcgccatcgcgactaccctgacgatcctctccaacatgtcccgtcctctcgagagaccctcgtcaacttcctccttctcgtccaccacttcctctcgctccagggatacgacgtgggcgtccacgaccttggtcggcatcgcccgggtccacccccgaccggtgggggacctcactacgaactcaaacgaacatccatgaaaacaaatgagactccgaccctaattactctttcaccgataacctcgggttaattccgcgactccactcactcctcgtactctctcaggaactcgagcacgcccccgtacctctccacgagcttgctcacgcgatccgggtccaccctcatcgcgcccctgggccggaacccggcgcggtatccgagcagctcgttcagctcactcgccggcaacgacacgagccggacctccgccagcgtgaccagcctctcccacctgtcgtctccccataggatggcggagactttgggatcattgcacttgcttgcaatcacgccgcagtaccggtagcggtcctcgcccttctcgtccctgaagagaagcacgtccccctcaccgaggctctcccaacccaccctctcgccggaaccgaagccccagataccctcgaacgttccgaagacacccgggatctcccggagtcgacttccggggtgcacgctgctggctatcctcctcctgtactccgccgtgggtctcctccagatgagtacgaggttctcgacctcgggatccctcctcccgcgatcccctcccagtatggactctatcagcgcctccttctcctcgctcgatatccgccccacgctgcccctgagcgcgtcccgaagccggcgtcgcatctcctcctcgttcctcacggtgtacagggtcctacgaccggccttccgcctcccgatgagccccctgagaccggacatgtacgcgtggacggcgtgctcgctgatctcgtaacccaccgactcgagcacgtcacggatgtcacccgcggacacgtgcttcccgtacatcttccaggccaggtacacgaccgccaccacggcccacttcttgcggagcctgcgctccctgagagcctcgcggagttcgctttctaaggaggtcataggcgaaacccacgacccccgaggtcccggttctccccggtgttcgcgcgtcgccgggaccgtcgggggcgaccctttatccatcccgttcggaaccgtgcaccgggctccggcgccactcggctgaaaccggcgcgactataactttgcgccacgattgtacgcgttccagcgcataggggggcgcgtgcttggatctcgacctgaccgcactgttcggcaagaaaaaggtgatcgtctaccactaccacggtcatccagggtacgggtaccatctctacggacacaagaccggcctgctgggaagcctgctgaagctgggactcctggcgatcatcgccgtgggcctgctggtcctactgctgattgccctgggtctgtacctgctactgaggctcctgcgagggcgccgagaacgcccgcccgcgacgtagccgctcccgaaccgacgtcgagtttgactcccacgcgtcggagaactcacgccgatgtaagccctcctccgcccgtacgctccggccccggacctcgggatctccggggctcggtcacacgtgcacccgtggaggcgctggtattcacggggaggatcgaacgaaatcaaaggagttgaaacgagggccctggggactccacggcggagagttttccgataccggctcggtcggacgggaacaccgtgggggtcccgggaaacggctccccgaacccggaagccggtgacggcgggatcgcatccgttactgttcacatggtttcggagggggtgcaaggggcgtgctcactcgcgcttcagctcggtcttgaggtccctgtaatcccgtttcagctcccgcaccacgtcagccggtcgcagacccagcaggcgcagcaccacgtacaccatcagtcccagtacggccagaccgacggccagcttcaggaccgcgagcaccggccacagcatccatccgaaccccatcatcggtccgccgtaaccgcacatggggcaccccataggaccgaacatgggaccgaacggcggcatccgagctcaccccgtccgtcctaacgttcgatggtgttcggaagtgttaataatactatcccgaaacgccgacccgtcgcaggtccccacgggtccccgtccgtcgggcaccgtgcgggacgtctcacgatcctcccgtgtgtgggatgtttccaccggttccgtcgcggctcacccgaagcttccaggcacgtcgcgagagctcggccgcccgttcaatcctccgaagcacgatcaccgcgtggaagaggaacgtagccacgatcgtcaacgccgcgggtacggcgcccaccaggaccaacaggagcaccgaggttcccgctccgatcaggacgacctcgggtaccagaatcccgtcgttcagcagggccgccgtgtaccccacgggatcgcgtcggtaatgcgacaccgcgcgcacggagggggccatcgtggcgacggctcccaacgccagggcgatcgcgaggcgcggacagtggaccctcggcaggggcaggtaaagtatcccgatcaccggggcgagcaggcccgtgaggagggcgttatactccaggaaggtcagggtcgcgtgcttgatcctggatttcgggaccggaaccgagtccaccctgcgggcgatcgcccagtagacggcgctcacggttgcgcccggaccgaagtagatcgcggccgcgatcgtcgcggccgcccacaggctgaccttgagcgccttggctaccttgacgaggatccagtggatcagtttcccgagatagtcgcgcccggacggcgatgtcttggcgcccttcctcatcgcgagtatcggagttacggtggggaggatcgccgtgacggccaccatctcgggtgatggcggcttcttgcccaggcctttgcactccatccacgcctcgagcacgcggtcgtggaactcctccaacctagggtccccgggcgagtagaggggcacccggagccagcgccacctggcgaacacggtcccacctacgacctcgaggatcgggagctcgccgagctcgcgtaccgcctccacgacggcgtccccggggctccctttcttatgcgccagtaggatgcgcagaccgtgtctgagccggtcggagtcgaagggcatgggaacgcgctcgaggtccttcgtcagcacgaccacgccgctctcgcgctcctcgacgtcgaggatgtcctctacggggatcctcctggtcccgccgggtcccttcaagatcacggcgtccggggttagctcgacttggttacccagatagcggcggaagactaaggtgccgacacccaagagtatcgcggtgaccgccaacgcgagcaacgccgggaagagcccgcgcgggaggatcaagtacaggcaaaccgcggtcgcgatcccggcacccgcgacgggtacgtagaccctcttcgggtcctcgagctcgggcggacggagcggctcggtcacacccgcccccatcccgaaggtgtcggcgcgcgccgaaaacgtttcggaacgtcacaaccagaccccgtgcccgcgcaggtgttaagcgcgaccgcccgggaacctcctgaggggatggagcccgggtcgtcccggcgggcctgagggcggggtggcccccgccaccgtgaggggcccgctgatgagcccgggtacaccgtcccctccaaacgacaccctccagagcgccacgaacccatcctcgcccggaccggtcccgtacgctcgaaccccgttccgtccggacctcggattagcacggcgcgaaagccgccatcggttccagtcggaggatctcgcgggcgaacgtacccacgtacgcgtcgaacggatgtaggagccgatggtacacacgctcatggatcgtccagtacaccttctcgagccccgggatacggtccagtcccagcgtgtggaactcgctcgggcatgctaggatcacgaggcacaggagaagtaccgtcgccggcggtagcaccgcgtcccacttgtccgaggggacgggtgttagtctcaggttccataccctccatctaccaccgtcccgacggaccaggagcgggaccccgcgcaccgtgagcgcgtcttccaaacagtgcaagcacccgcccaggaggaccgcggctagacccgtgtgtccgacccaccaagcgagaaaggctccgagcgcccatggtacgggccagtgtaggatcccgcggtgtccgacgaccgtgttgatcaggcgacgaagcggtaacagtgtggctttctcaaggggtacgagggctcgggaagccacggagctgggatgatcgagatcgggcagcaggctcccgagagcggctgcgagcgcgtgcttcggatcccagaggtatgcgacgatcacgtaggtgagcaggaggtgagtccgataacgcaagaacctcacccttgaagtctccatcgcgtctcgggggcgtttcgacgccggccctcgggagccgacgtcgttaacgttaactccgggacactccggcgtgacgacccccagtcccggagtgggccgtgcacacggtcgacctcgggagggttctcgacgaccgaaaccccctttatgtttcgaagttagggttcgttcggggaaaccggttggtagcccaccggggccgtctcttcgtagaaaccgacgggaagcttctgggttcctgtgaggcctcgttgatcgtcaccgaggagaacgtcgtcgtggtcccacgggagccgatcgagggtgtcgacacctcggatctcgtcgtcgagtccgtggcatcgcggttcgactcggccgagctcgaggagggtaacttcacgccgcccaggtccagggtggtcatgaccccacccacggccgcctcgatgatcgacctcggactcgccctgaagcggttcgaggtcgacggcgttaccgtcctgacggtcgtcggtcccgccccggcgtacccgttcgagcgcaggatcctggctcccgagggtgagatgacgctgcggttcgagccgaaggatcccgtggcggcggaggggagcctgcgggccgccgcgcgcgccgcggtggaggggaccgtcggggagaccgtcggaaggagtaaggcggtgcgactctgcaaggtcctggtcgagctgaaccagaccgtaggacacggcacgctcaggctcgtaccgcgggacgagaacgtcctcctcgtactccagcccgaggaggacatcgccgaggagttcaaggacgccgtgggtaagtcacagatcggcatcgcgctgacaccacccgaactctccgcggtgttctccggcaaggcggtcgtgaagcacgggaaggaggacaccgtccacgtgctcgacgcgcgtaagacgatcgagttccgggcggaggggaagggatgggcgctgagggccgtcccgacggacgtgatcgcgggcagcaccgcgcgggtactactgcggaccgcggccgagctgatcgtgcacgagggtctccgacccgagtaaccgatacccccgtcgccccacgccgtacgggatgcgacggtcgccgggtcttctccctgggaaaagaggtgataagggtggacctcgagccctctcgggggaaccggatgcggtcctttcccctcctaccggtggcgcttgtgctactacccgcggcggcccatgcgggcaaaatctcggtcacggtctacccggaaagcgtgaacgtccaggggaacgcgttggggatccacgagcggctggagaaggaactcgacctgatcgtgaccgtcaccgacctgggcacgggagccgtctacgacatgaagttcaatccgctcgagccatcgagtcccgccggtctggacgtgacgggcccggtgacggtcatcgcgacggtcaggtatgccagaaacatcgtgaccaggttcaacgtctggcccgagggtgcgagctccttctcgagcgtcgacgtccccgagggtcgactcgagacgacggtgaaccaccctcggatctcggtaccctcgacgggtacgttcgacgtcgagtgccccatcacgatgtccctgcgcaccgacaagggaacggttacggtcaagctgttgctccacgtctccgggatcgatgtgaaaggggtgaaagccgagagaaagggggtcttacccgagttaccgtcggtggtgagacttatccccgtggccgtcgcgttggcacctatggtcgtgattccaggcttcatcctcatcgacttgacgctgaacgtccttaacggactgaagtcgactctgggacccgtgctcgaccacctgttcggagtcctcggaggacttctgcctcggcccgggtagcggtgatacgctccgacgctgcacccctcgaacacttccaccgggccgatgaggaacctaccccgaggccgaaccgtgacgagggacggggtgtccgaggcccgccgtctcgacggccgcgataatccgaccgcgtccctcgggaccgtcccgttccggttcccgtgcgagcccgcgatccggaggcgtcaccgacgtaccgtccggacgcccttaacgcgccgcgtactcgacttcgggtcgacaccgtgtcacgcgagcccccaacacctatcgggcttagtcaacggatagcggcccggtcgtgcccgcgacgaccggcacgatccgggcaatcgcggggagaactcgatgtccgaaactcccgaggtccacatagtactgatccctcccccggacatcacctggctcctccaggagtggaaggtgtgtgagttggcgctagaggtgttccgcggcttgttcgcgggccggattcgtacgagaccgctggtcgaaaccttacgcgagttgggcgcgatcgaggaagaaccggaccgggagagcccacctggtgtcctgacccgtgtcgagaaacccggtcacgccgtcgtcctggacgtccccgggttcggttgcacgatcctcgaggccgagctcgagagctcgggattcgaggtgcgacgtgcccggccggaggacctccggcgggagaccaggagactcgcccgtccggagagcatcctagtcctcgccctcccggtcgccctggcgctctcctcggtcgccgcggagctccttcacgaggcgcatcaggccctgacggatcggatggataccctcaacggggatgcggacgggtcggagtccgcgggctggacgctcgtctcgacctggcatcccgcactggacgtcacgaccctcctcgacgagacggtatcgcgggactcgtggggactctaagcggagtcgactggcacgtagtcgatcgtgtgcgaggggaactcgtagagatgatctgtgggcggtcggtgacccccaccgtcgtcacagatccgcgagcgccaggttgaaccctcatcccgccaccgatccgaaccgatcacaccgtctcgaaaaatacctccggtgggcccgctcgtcccgggctcgagctcggacgggtgcggtatccttgccgatcggaggtcggcggtgcgcgacgagaccgcgggcacagaccgaagccctcgagaggctcgggccatcgtcgctccctgtactctccggaatgaccgaaagacggaaagtccacaccggccggacttcccgtggagttacatgagcgtcacctagcaccgagcacgacggggccggtgaccttgtacggggtaccgattccggtgctcatcgcgatgccgttctacctcgcggcggtgggtcggggggtactggccctcaagtgggcgtggcgcgccggtaacaccgtccgaacggcctccatcgtggcgtcattcgcagttctgactcttctctacctctccgtaccgacggtcacggtcgcggcgatcacgctactggtctcgaccgtgctcttctacctcttcaacaccttcatcccgcggtacgatcgcttctacgtcgagtaccgaagacgctgggggtacgacgaggcccccaagcacgaggtgctggagctcgcccgagagtgtcgtctcgacgtgctcccaccggccctcaagctgctgaacggaaccgcgtacctcgccgcctacaacgaacgggacaatccgaacggatgggatccgatagacaggttccatcggctcctcttggcgttcgaggagggttcgtggaagggtggctacgtcggaccgaacgcctggcggatcgtgcgtggggtcgccgagttgtccctcgaccaccctgaggtggagctcgcccgccgactcgaggagggcgagtgaacgcgccctcctcacggatccctacacccccttagcccggagtgaacgttacgatccgacgcaggaactgagatcggcctgtgtgatttgagagtggggacctagcgagaatccgcacgcctgcatacggctcaggcaccgtcgtcgaagagatcgcacgaaatctcggacggcggctcgacgacagtgacgtggttccgatcacgtacgagttacccactttactcacactcacgcacggatcacgctcgcgtcgaacgattcagaaaccacatcttaattttacgatacatgtttccaaattcggaaacacctaaagccccaggaaccacgggaactacagcgggtaccgacggtccggccgatgaggacccgtccggaccgaacccggtgaggaggggctagggtcccgaggcagtattcatcgacgggccccgatcgttcaggtcgggactccgtaggtctgacggtcccggcgggaggacccgttcgttacggatttcacaacgattctccatgaggtggacgcccaccttagtctcctcggtacgatcaccggcggtacgaccatagggaacgtcctcaggaccacctccaggagatcgatcagcgtgacctcacccgcaggaccctcatcctcggacgtctcaccttcggccgaggtggatgtcgcgctcggtacttcaccctcggcgccgacaggacgcccggagactgtttcgccgatcgtggctcgctcggagtgtcgtacgtggtgagcgcctttcgagatgagcccgccctctcccggagtgagctcggtggaggtctcggcaacagtctcggacgcttgaaccggagtcaccgggagttgggatgatccctcgggccccttgagcgactcccggacggtggaaagtcgctcctccgggggttgatgcgcgttgttcccccgtgatcgtgttcctctcggtgatgctcgtactcgtcgtgatcacggacgtgctctcgcccgctcatcaccttcaccacggacccgtaccacctcacctcctggccgtccagatagaggtgaatcccgacatcgtgggatccaggtgacagctctacgggtccgaaccagtccgtgatccgcgcgcccttatcggcgctgtacgccttggaaagagcctcatcgtcgaccctcacgaccacggtgatcgtgcccggatccttggagattacgctcatgtacacgtagagctcattggcggcctcttagggaagctcgacctcgggtcggatctcgccgtctcggaccaggtaccagtttccggcttccagtccccctgtccgtagacgacgtcgacgtcaccttcccgacggggcagctggtaagacttcacgcccttgatcgtggcttcgggcggtaggtacagggtcacacggtgggacttggtcacgtcgtcactgtcggcgtacaccatgtagacgacgtcgacgtggtcggcggagatccccgtgacgaaggcctctactccgaggtatcctgaggcgggggaagcggtggcgactacggcgatgaggagtgggaggtacttcggaaccgacacgggcctccctgccccgcacaacttatctttaagatatccacatttatctttcgggacgtatacgcgggggtctcgtgttacgaacggtacgtaaattgggaacatgtcatgagcggcggggcctcccccgtatccgactagtcggagaccaaccactggacgcaagacccgggctccgtctcaccggacagcggtgtggcctcgggtctcggccgtacgtcccatcccttccgtttcgcgagctcgtcgaacagcagtatgaacggacacggcgggacttggcgtatcgtctcgagttcctcaggatccgccacgtcgcgaatcaagctcgagtaacacaggcgacagcccttcacccgcagctcgtctccctccaactccacctccgcgaacggttccagcagctcgatcagcgcctcccgcggatcgtcggggagatcctcctcgagcaactccgccattatcctcgccatgacccgacgggccgcgttcccacgctctccgaacagcctcaccgtggccacggccatcgcgcactccatggccctcacgaactcccattcgacagtcatcgaactccctgcccggacgttgacgatccgatttaagccgttgtggtacacggcgacccgtacgctacgggcgaggatctcggctccggaatcgccggacgtcccgatctttccgatctctcgttcgatttcgatctaatcacgacgcgggccgactccccgagtatccacgtaaccggttaccgcgccgtccgcgtccttcgtcccgacgatcgaaacgacccgtagccgaacggcgagttcgtaacactgatgcatcctaaagatcccgccatatgcaatactaattggaaaagtttatcattgagtattattaggttcgccaaatagtattcaacgttgttaagggggcgacggagtgctccgagcgatcgccgtcgtgatctcggcgctggtcctcgcggtaccagccctcgccgagccacaggctgacctacgggcgttgggagaaaagatcggtaacgacgccttgaccacgctcggagccacggccggggaccccaagttactggtgatcacggacgccagggcggtctgggtcgactcggacggtgacggcacgcccgacacgccggcggcggccgtggcggacgccgtcgcgtcggagaccggctgtaagatcggggagaacctcgtgttcgtgcagagtaagccggcctccgacctgttcgtggcggtgttctacggtgacgagagttcgggtaagctcgtgttctaccgcgtgacgcacagcctgctcgacaggatcgcacggggcgaggtgtccgtcgactcgctgaccttcacgagcgatccaagcgacgagaacggcatctacaggtacgtgctcggtgacctgaccgctgagaacgtgtttcgggagctgctgagcgcggcggggatcgacccgagcgggtacatgacggacggtcgcatcgacctacagaagctggatgaacacggctgggacggcttcgatccggacaagtacacggacgaggcacttcagagcttcaacgacaagtacttcggtaagatgtgcgggttcggcttcaccgtgctgtcgatagccctctcctgggcgaacggtctgcccaggcggtacctggcgagcgtggagcggcacgaccacctgtgtccgggactgatcagcggcatgttgatcgtcgacaagctcctccgggagggcaaggcggaagccgtcaggttttacgtggcctgtccgatctggtgcaaggatgacgcgatctacacgaccctcgacctgacgcagggtaagcggaaccacttcgtgttccatccggactcgcgggaacgggacctcctcaatcggaagctcggcggttccccggccggagtgttcgtgctccaggagggagaggacctcaaagccctcgtggcgacgttcaagtgggtcaactggggcgcggtgttcgggaagctcgcgcgggccggctggggcagcgtcaagggcagggtcttgaactcgatgatccggataatctgcgacgtggtcttctgtcgcgattggaacgtggatcgtgtcgggctcaaggagtacccgatgacctgcaccgaggccgcggcgatctgcgcgggtcgcgacccgtacatggtgttgggactggttgcgccctacacggacgatccgaaggtggctgccgtcgagcaggccctgctgtacgcgaggaaggtcctggggctctcgtacggtgacgagcgagcctatgtgatcaccaacgtcacgtacctcaaggacttcgtcgacggacgggtgagaaacgtcatcacccgaacgctgggcctggacgcgacgttttccggtagcaaccggagtatacaggtgacgacgctcgaagacaggatcgtcgagttccacacggacgagaccgcggatcccgtgatcgcggtggtcaacgcggagacgggtgagggtgttgcggtcgtcctggatctggcgaagttggagggtaagagggccgaggacatcctgacgatggatccagaggagttcgtgaaggagtacgcgaaggcgtacacggataaggtgaagatgaacgcgttcgagatctcggacgaggacaacgataagctctcgcggctgggtcggtacgcgttcaacgtggtcacgctcgcaacggcggtggttaacggggtgccgaaggacctactgcggtgcgcggcgtggcacaaccatttctgccccggggtgacaagtggctggatgatcgccaagtacatccaggaggagatcctcgcgaaggagccgttgaaggacaacgagcgactggtgtggatcggagtacccgtctggtgcaaggaggacgccgttcagacgctactcgacctgacgcccggtaagcgcggagagttcgtgatgcagctaccgagggaagtgcaggaggagctgaagagggagtacggcatcgacgtcgcgggtatactgatcaggtaccagtataccggtaagggcaaggacgagcagatcctgggcggtaaggcctacgtcatcggattcgactgggacaaggccaacgagatccgaccgaacgtccagtacttcggacacgcggcctgggccgtggagctggcgaagcgtgatccgagggagttcgttagggtcatcaaggagattagcctcggcgcggaggacgtgaagaagctgaccgaggacacggcacgggtgaacccgttagaggtcgtcggtgtgatccacaatcccaaacccaagaggaagccgccggtgtactgggtgacggtcgcgctggccctgacgttgctagttttccgacgccccctcaagccctcctaacgttccttcgacccacagctcgttcttcgagatttcgacctgagatcaccctaggagcgggggagaaggaccgtgctggcggccttgatcctggtcgtaacgaccctaccgacccccgcacatgccgacatcgggtacgtcggctacgacccggaagacgcggctcactggtcaggggtcggtctccttcagcacccctacgtagcttggaggtcgggcggatacaagaccgcgacgctcgccgacggcaagctcctactgggtaccgactccggacgggacgacgccctcgtcgaagtggatccagcgacgggtcatgtactcaggaggtactccctcgagttcgatcccggggattgttcctactccgtaccgttggtcgcccacacgcgcgagggaacctgggtcatcaaggcctaccgaaccactaaggacgagcgcaatgtcggggcgatcctggcgatcaacatcggagacggggcgaccaggtacctcgtcgacgccgacctagggccttacgaggtcgaagaaacgcgcgtcccgacggtgttcccggtcgcctgtctcgacgtcgacggggacggcgacgaggaggtgatcgtcgaggcgccctcggggatgttctgctacgacgttaccccggagctcaagcgcctctggtggttcaagtgcgagccggtccacctgccggacggagtatcgctgcccgcgatcctcgatctggacgggagccggctgctcgtggtcctggacgtgcgtgacggtgtcccggttctgcacgcggtcgacgtcgggaccggcgaggagcggtggtccatcgacctgacccagcatggggtcccgagggtgaaggggtaccggtcggtctggaaggtcatgaccggagacctcgatggcgacgggaaaccggagctcgtggtgaccctacccggcgcccagcggagcgtccagtcctgtggcctcgcgacgaagggctccggagagagttacctggtggtcctccgtcctcgaaccgacggcgccgacccggtcacggtgctgaagatctccgacgtgtacccgctcaactcgggcttcggacatccggcggctctcggggacatcgacggcgacgggaaggacgagctgatcacgttcttcacggaccgcctgcgtgtgttcaagctccatggcgatcgactcgagcaggtcgcggaggttaagccgggagtcaccgtgttctggagttccgtctgtctgatcgacctgaccggggacggcaggcctgaagtgctcctctccggcaacccgggccggacggtagccctgaggtacgaccacggccagttgtacgtcctctgggaggtaccatacccggcccaggtgaaccttccggtccccgtggactccgatcgtgacgggaaagtcgatacactcgttctttactcgaccgagcacgggatcgtggcgctgaaggccggtcgaacggcccctacacggggggagaaatccgagggtaagcgccggcgactaccgttgatcccggtcccaccgattcccagacgacgtcggctcttcgtcgcgacgctcgtcgtcgcggtcacgatggcggcagcaccggtgacggctaccgtaccgctttactgtgaggacagggccgatccctctacggttcaggcactcaaaagcgaggtccatcgccagatagtcgacgcggtgcactggctggcggagcaggagaaacccaccgagacggagttctacttcccgggctggtactacgacccgaacccgacgggtgagcctaggaggttctcggccatggacacggcgtgggtgctcttcgggctcgcacactgttacaaggccgggatcgagagggacctttgcctggagctcatcaagaagggtctgaccgcgctcgaagcctgccaggacgacgaaggcctcatccacgacgtgcccgtgaaaagtctaggcgcgggaagcttcacactcgggtgcgcagtacccacggcaccttcgagcgaggaggaggcccagcagctgaaggaatgggtcggcttctacacctcgcagtccctacccggcatcgtggccgtttaccgcctggtcgacgacccggaggtcaaagagcgggctaagcgcatcgcataccgtgccatcgaggcgatgttcaagcactactggagggaggaggaagtgaccactccggaaggtacagtcgagatcggctacttccagatccagggccccggagcttggtccgataggaccaggacaacgccgctggtgctctgggccatcctctggtcggggtacaggtcgtggaacgaccgggaggttcagctgatgtggaacctcctccggttcacggagaaggagcggacggtccgaggtatccccgtcgcgcacgtcggcgacatcaagatcgactgcgactcgtggacgctctgcgccctggcggcggtcggtaatactgtggattctggcccgttgagcgatctcgtcaggaagctcgtgaactgtatcatggcgcatacgaagccgacgcgcggtggtctgatggcggtcgcctgccacttcggagagctcgaagaggagccggggaaggccttcctagcacataaggccgcacgagcctactacggtctactccaggcgggcgtgccgcccgacaaccggctcgtcaccgagatcgtcaggttctgcctcaaggcacaccggatcgacccgaacgagaaggatccggtgaccggtctccagggtacgtataaggacgacgtgccttactggtgctggacggacgtggagtggaagaacgactaccgcggactcaaatgcttctgcaccgggatcacgctggcgtacctggcggagtggtactcactggtcgaaggcaacgaaccctcctgccgctcgaagaccactgagcgtcatcgagtaccggtaaccccggtgatcctaccgttatgcccacgacgcgcacgacgtgactgagctcacggcagcatcctatcggtatcctcggtttcttccggccctttctgttcctccgtctcgatctcggcacgtgcgagcctccgaaccagcacgatcagatcggacgtcgggtcttccagctcctccttctcccactcaccgagtggatcgtcccggtaccacgcttccttcaggttcgttacgatcgccgccggttccacgtccgagttccattcgatgatcgcccggacgtaccggagcgccctacgcaggtcctcgtccgtgatttcgacgcccgggaaccccacctccacgaccacgggcctgcgatccatgaccaggaggtccacacgacccctaaccccggggatcctcacctgggcgaccgcgggcaatccttccttccgaagccagtggtacacctcgctcacgaagctcccctcggtgacctcgatctccaacccgttcaggttgacacgcgaggggtgtccccccgtcagggaccgtgtttttccggaatctcacaacaaccctcggtggtcgtcccactttaaagataggtagtcaccgagtctcgggctccgatccggaagggacggaaggcgtcgggatgacggctcgagatcgacctgggccggttcgtcccacgcggaaccgtcaactcgtgctgctcttgaacctggcatgtggtgcgaacgtcaggaagagcacctcatcggcgaaatctatgtccccgctaaccccgtacaatcgctccagtaactcctttttaaccttatccttattcaatacaaccagcaactcagcgtcgacaactttaaacttcttcttcccgttcaacctgtaatctacatcaactttgctaactttgtcaatgaaattactcaactcgacttcgacaagtatctctatatacttactcactcgacttttacttttcgctttctcaggtttttcccaaatcttctcacatgaaaatacttccttttcctgtaaatactcgataacattatcaatagttttcagggaaaaattctctttctcagcacggatttcataaatacatttgacttcttcatcctcaaccttaggcgacatgttaaacttcacgttcgcgctacatttcttcagttcccacgagtgatcatcgtcaccttccaatctcatcaaggacctagcatcgtccttgaaattaattttcatcaacttggagtcacaatccacctctatagatttcaccgtcagtggctcctcagtaggtaactccacatcaccgatcctaactttgcctacgggtgagtggaagacgatccagtgctcccattcgacgtcgggttcctcggccttcagccggcctacaccgaacgtcgggttgttgagtgtggctagctcgagctcggcgctcctctctctccatcctatggcctttttcccgtagatccagccctgggcgcccgactcggccccgctcagcacccggctgatcgtcccggagatcagaccgcggggatcgtggatcgtggcgatgttccgcagcgtgagccggtggggttcgggcacgcaggtcggcggtcgttgccagcatcggagtacggtgggcccctgattcaaccttggtcccccgcgcttcacaacttgacgccaacgttggcggaagcaccctttccagtgagttttaaattccttatcttcaggggacggtcggtcgagaccgtcgcggcggatcgtgttcggaggagggcccggaccacggtcgctcggagggtccgaccgggcggcccgtacggaggcgtccgtcggagagcgtcgtaactcgccggaagggaaccgtgcgcccacgacgtcggcaccaggcggtcctcggacgtctcgtcgggagggcccccgcccccgcaccaagcgtccggtacggtgttccgccccggggtcgcatcccgtgacccctcccgcaggggtgggtcccttggtcgagtggagggaagtaccggtactgcccaagaacacgttcttcaagaagctcaacgcggcgatagcctggattgacccttttgacgagttcgcgaacccggacgtcaaggagctcctggctggcgtctcggacgagctggaccctaacccgctgctccactggtcgaacgtcctatcggccgaacacccacccgaggaatggcgcatcccgtacgagctggccgagtacatggtgtgtttcaacaaggccggggcggccgtcctgaggtacttcgccgatgccctgaggaacgtgttcgaacgtccttcgctggatcggctcgtccgaccgctggcgatcgaaatggcactgtccgacggtgacgagcttcccggactcgtccgctcggagctcgggatcgagaaaggatatcggggtctggggaagggtctcccggacgccttacggccctcacggtggctcctcgtctcggtcgtgagccacgcttgctccaacaggaaggcgaggcccgaggagatcgcggaggagttcgaggaacacctcgggttcgagctcgagggccccgaggtcatcgatcggctacgggagaacgtggaagaggccgtcgaagacctggtgacgtgggcctcccgggaaggtgaggacccgaagccctacgtggaggtgttcagggaggcggtcacagcgacccttcggcgctcgatccgactcgtcaggagacccgaggagatcgcgaaatcctgcctcaaggtggatccgacggtctcgatcggaggcgtgaagatcggtccggaggactacgacccgctgtgggagagggtccgtcaggtggacgtcgaggaggtgaccgccgagatcgtggacgagctactggacgagctgacgcgacggtgagtggccaccgggaccgcgtcggttcgccggacggatcgtgcgccggtcaaaccgtgcaccgaaggacggcggaccgccgcgggacttatcgttacgatatccgtgacgttcggccggggagggtatcagagcgccactaggatcgcctttaggaactccgcgaacatctcaacggccgtcggcccgatgaagacgagcaccggcgccacgatcaggatcggtggcatgtacttcaggacgagctcggcgaggtccatagccgtatccaggacgtcatcgaggtgtatccgcgcccgtgatcccccgtgcgccagtccctcagccttcactttcacgttgaacttagcgaggacgtacctggcgtcctcggggatctcggtggaatgcagacccggatagagctcggctgccacgacgcactcggtgctgaattcagtgtcggccacgtactgacttacgcagcctacccgcgcctggagcataccgtccggcgtgtcgacagtagccgagctgcacggccagtcggggaacaacgtcgccgcgagcgcggtcttaccgtcgtacttcagcgtcacgctgaccgtcacgggacccctaatgccctcgaacgtgaccgatttcgggacctcggaaagcttgaactcggcggtgtgggtggtccccgtaccgacgtcggtgaccgcgacgtctaaggtgagcttactcaccaatgtgtcgtaggtaccgagctcggcaccgtttgagaccatatcgtcgagagccacattcaccgtgacctggcccgcgtgtacggctgcgggtgcgatcgtgagaagtaggacgaacgcgagcgcctgcagcacgacaccctcccccgttagcgttaccgaaaatcgatgaggcttttcagtttttcgcacggtggtagagacgtctccgatcgttctcgggtcatcgtgaagtgagctccgtcgccccgactccgcgttcgtaacccgagcgtaccgacgggagttggacgggcgtcagaaggcgtatcccccacacaccgagccagccgatcgcggccgcgagcaacggcctgggcatccaagtccagctgcggaaagtcgagaacgaccggctgaagggcccgtacatcgacctcaccgagacgccgaggatcccccttggtgatcctcaaggccgtcaagctcgaggtggccgtggactccctcgaggaagcactcaaaagggagtcctggctgtaaaccgaccggagtggctccttgagcacgaacccaaggtgagcaaggtacccgtcagggaggggaggaagatcccggtgaacccggcggttgcgctggcggggctggtgacactggcgtgcctccggcgccgctgatctcctccgtctcactcgcgaatcgttgtgaaccacgaaacgatcctgggacgggcctcggtctcggacccttcctcatccttccgttcagaccgggtgaagctcctcatcggtccgaccgagactccgactgaagtcgtacggccggaagaccatggggttcctagccgcacggtttcatcccaactttcaccctaactcggaacgtcctcgaccgaggatcgaggtcaggggtgacgaggggctccccctcggccgggcgtcagccttcgccgaccatcttcagatggatcgggcagtccaggcatctcccgcatctcatacagtcgaaatcgttcgggaacgcatcagccgggtcaagagctttgggacataccgtgcagaccttacagcccttgcaaccctttcgaacgatctctgttttgcccttaaggagcggatcgagcaggctccaaccgttcgccagacgcaggaggacgccgaccggacagatgtaacggcatacgaaccggggaacgaacacggacgcccccagtataccgaacgccgccgacatcttgagcaccgagtaaaggccgatctcctgccgtcccaacaggatgtaggataggtagtgcatcgggcagatcttgtaccagagcttgtacgcggcgaatggtccgagcaccaaggtggcggccaagatcacgtacctcaggtacaggagcaccccatgaccgggtgggcggtgcacggtcaggcccagtttcctaccgagacccgcgagcgcgtcttggacgagtacgaggggacatatccaaccgcagacggcgcctccgacgagaatcgccggtacgacccaacccaccagtgcgaccgccgctagctgcgtcagggtcacgagcccggccgccacgaccggcaaggccaggagcatggtacccgtgtcgatgataccggcgcagcccgccgcgatcccgggtaccacaaccttgagcccgaacgctacaccgacggcggccacaccggcggagataagctggaccgccaccctcagctttctgatctccatacccggtatcctcccctacacgtccggtaccgttagacggacgttcacagtgtcgaatataagggatagataacagacgacacgattggaggaagagcggagctcagtgacaggggttcgggcacgccgcgcagttgcccgtgcaaacgaaaccgccggacgacccacttgacgagcccgtagttaccacggtcccgccacccgaggacgagctgccggcgtatgttccattgccgcctgacgagccgccaccggtcgatccggaagatccttcctccggacgccgttcgcctccgctcttttcacctttcccttccccacccttctcactgacctcctcgtccttttcacccgccgagcccttgtcgcctccgccgatcgcctccttggcgatgtcttcgacggactttcctactcctcccaaatgcgagggaaccgtcaggatgtaagccagaatggccgccatgaccgcggctctgaacccgagtgtcccaagcatgttttgagaccccttcaaaagggttaggaaggggcgtttgggggaggttagagacgccgcagcagtaccgccgcgaccacgaggcctgcgatcacggcgacgaggcctacaggggctgtcgatgaggtagtcgatgacgtcgtactagctgtggaagactgctgttccgatgtgttggtcgaactagtcgaggtcgtctcggcggacgaatcgctcgtctcttcgctcaagacctgtaggttgtcacagtacccgtcaccgttcttatccacgaacgcaccacagtgctgcccccgagccgtagagtcgtcgaagtaccggccggtgaccggacagtagtacgtcgtagcggatacggcgccgaggacagtcagcgctgcgaccagcagggtgaggatgcgcacgactattcccccatgttcgtctttcggccacttccgaacaatgcgtttcgacgccttaaggtttctccggagtccgtgcaccgcccaacccgacgtacggtagtatcctgcgtacgccgatagagcactacgattgaaccatcacccgaaagcgcccgtacaccgtcgtaaagtagaggaaccggcttccctgagtgccgggtcccatgcgccgggttccatccaccggacggacggcgcatcgcgggtgatatcgacgggctccgctggactctcggagccctcaacgcgagccgcgagcgataccccgatagaatccggaaacgacagcagcgcgacacgatacgacaccatcatcattcgaacacgaaggcgcacccgggcgagactctctcccctcatctcctcttcgatgtggccttaacctaggaacctccgtagaagcctcgagggtttccgctttcccctccgtccacgctccaactcgagcagccgtgttccctcgggacctctcgttctttgcagtaccccgatcatcaccccgggatgtccgtccggcaacgcctggagtacctcaaggcagtcctcggggatgatctccttttcgagcttctagctggcgagctcgtctagagccgtccaaaccaggaacacttcggtcacgtcgaccaacttaccctcccggccgtccacggccaccaatcgttccgacaactcccccacgtctcccgcatagcgcatacccctgagggcggctgagaccgtcagtcccgtccagccgcaccgtacgtccaggaggaccgcaccttccccttctaaggcccacgtcgccgtgtccacgacttccagcgggttggacccgtcgacggttaccacgtcgaaacccgattcctccagctctctcacctctcggccgacgaccgcgacccgcccgggcttcgcacgcagacccaagagtaaggctacgctcccgaacccgtgcttcggtaacttaccgacctccagcccaactccctcaaccgctccccaagatcccgtcctaactcccactctttggtcctttcacgctgtcgggcggggagctccaggaccccgttgacacgcaaggccgtcaccctccgcgcgaccgtcccgacactgtcaactcggagttaaaaccgtttctacgagaccgggacccgtgtccacaccccacggaccggcggcgtctcccgacgaggtctcgacggtcgaaagcgcgcgatacattcacgaaattcgcggccggacgacgaacacctagagttattaaccgcagaacgacccgggtacccgcgcgggaaaacagcgcctgagggcggtggttcggtcccgttcgggcctttcatcgggcggtcaggtcggtcagagcgactcccgtattggagggtagtccggcggcggatacactcaggggaggatccctgcggatcgtccactcactaacggctccggtcggaaacaaaactagaaatagcctcctcttccgccttagaggggcgaggcttccgtgagtgaagctgaactcgtccgggagctgatcgaggagctccgggctctccggcacgagatatacatgctgaggatggagctcgaaagactacgcggtgaagtcgaggaggtagagtccgaggacgacatcccggacctgctccggcgggccgaacgagcggctgagatggcggtcggagatatcgacctggagctagagtccgatgaggagggtaggtggtccctcctatgatcgcatcctgagtcccctccgtcgacccgagctagttcagacacatacccgttttacgcgacgctatcacccgacctccgagcgatcccgtgagcccgtaccggacaccgggggaggagtattctcacgtttgaggtgccagcggcccgtccacagtggaacgcccgcgcggagtacggatgctccagagccagggaccctcatccccggaacgatctgtagagggctgaaaactatcgaaacgccctcgaagttgaaaaactgtccgaatgagtcacgaaaccgtggtgacggcctacggagccccccgcgagaagccgctataagcgggccgacgtgtactggtggggatgaccgaggcgagttcgccgtaacccccactcgcaccgtgggatccgggatgaagaggtcccgcagagccgattccccggatgaggggaggggcccgacagaccgtggcaggcttcgcgcgacacgggggcccatgccttggaatcctatcgaactctgttggctgtactcttgatgggcttgcttttcccctcttcgtgggtagtggggaaggtgcgggtggaaagcaccggtatgcccttcgccacgtactaccagaacgtgaagatgagcgaggtactgcagaagcggccgagagtcctcgtccttgacccgtggtgtggccctaatggacgcccgtggacgaaggaagagctccggaagatcaaggacgccggggtaaagccgatcgcctacctccccgtgtgcgtggttgcggagtatcatccgaacctgtaccgcgaggccagaaggcggaatctgctgggcgccgacgatcccgagtggccgggggactacgccgtcaagttctgggagccggcgtggagagacgtcctccgctcggagctggccaggctgaaggacctgggcttcgagggcgtgttcctggacgtcgtggacgctcactcacgtgactggtacgtgcgatggtacgatcgagtcaatccacacggtgatctcaggagggacgagctgaacgccgtgaaatggatcgcccaaacggctcacggtctcggtctccgcgtcgtggtcaacgcgggtgcgtgggcgttcgaggggacggtatggcccggttgcagtctagactgggcttcgctgtgaccgtcgagagcgtgctctcggacggctccaggaggctgtactcacggagcgaactcgagagtaacctacggacactgtcccggttccagggaccggtctacgtgatcgagtacgggctcgatcccgacgaccccagcgtccgtagggccgccgagaaactgttcgataagacacgagccacgtgcgtgtacataacttccgtcaagcacgacggcataggagtcgccctcgtccccctccggaggtggctctgggacgtgacgctcgggccgctgctcggggaaccaccctcttggatcgggggcggtcggtgagcccccacacctcatccgccttcggtgacccggcacgattcatcatcccgaggacggggcgtccccgccccctccccgacggggctcccggaacccgggttcaccccgcgggtcacaggggtacgggccgaccctcgtattcccctctggctctttccagcgcccgggcggttaccatcttctcggacggggcgtacccgcctccgccccggaacacgaacctcaggtccgagtgtacgccggacacgtcgaactccgccgtcccggttcaccctcagacctcctcggtgacgacccgccagcgtccgtcctctcggacgtacatccgcacggtggctcccggtagggcatcgccggtcctggcgtccaccacggccacgtacacgcggtcgttaccggcgtaccaggcgcggatcctcgtgggtgtgtttccggcatgatatccggtcgtcaccagcccgagaacggtcagtcccaataagcctaccaccaccggcaccgcccagcggttcaggggtttaccccctcaccgcaccacccgatccgtctcaggaatcgcgacgtcatctcacgaagtcgatagctcggtcgtttgggggatggggagggatcatccctccaggaaccgggcctcgctgcgctcgacgaactcgcggcagacctccttcgggtcgccctccatgacgatttcaccgtcgtcgacgaggacggcacggttggccgtctcctcgacgaacctgacgtcgtgactgacgagaactgtcgcgatcttctcgcggtcgacgatgcgcttgatggagttagcgacgctacggagcgtgacgggatcgaggtctccgaagggctcgtcgaggaggagcacttcgggttcggtggcgagttcgagggcgatggcgacgcggacctgctgtccacccgacaactcgccgaacttcatgtcgaggacttccatggggaggtcgaactcctcgaacaccggacgggcgaacctctcgacctcgtcggaggggaacttggggaagagctcgtcgaggatgtcgggactgaggtcgagctccttgagcttggcctcggcctcctcgcggggtaggtcggtcagcgcgtagagcacgtcgagggcctcctcgccgagcccgagttcctccgcgcggcgtctggcctgctcgaggacggtggagctcttgacgcccagacgacctgcgagcaggtcccggacggtggcgtgatggacgtaaccgaactcctggtggacgatgccgatgcggcggcgggcctccatcctgccatggccgaggtcggtcatactgacccagtcgccgtcgacgcggacctcgatgtcgcccgagtcggggagctcgagcccggcgatcatgcggaggagcaccgtcttacccgcgccgctcggtccgacgacagcgaggatctcgccacgtctcacctcgagctctatcccgcgcatgtggagggtctcaccgcagcggactagagcgtaccgcttctcaaggtcccggacgcggacggcgatctcgtcccgtggctccggcacccgctcgggctcgggcatgccgcgggtgagccggtcgacggcctcgcgcggactcccgtgtaggacgtcccgcccgtcctcgaggagggtcgcggagtcgcacaagtactcgatgacctcggtcaggtgggagacgacgattacggtgatccccttctcctcgttcgcgttcctcaccgcgtcgagcagctgctgcttggtgccgggacacgccatggctgcgggctcgtcgaggaggagcacttcggggtccttcgcgagctgacgcgcgaggagcaggcgctgcttctcccctccggacagcacgggcgcgtaatggtcggccttgtgctcgagcccgacgattctcaggtactcgagggcctcctcgtagagctcctcgtactcggaggaatcctccggtgggagctcctcggccccgcggcgcttccaatagagcttccgcatcacgttctcggccgcggtctcgggccacaggccgaactcgcgctgcggatggatcgccgtgatccgcttcacctcggtgaaccgcgacttgggggagtcgggagtgagctcgaccccgcacacctcgacccggccctcgtcgaaccgctcgaccccgcgcagtatcctgatgagcgtgctcttaccggccccgcttcgacccaagacgccgtggatctcgccctcctccacctccatatcgaagccgtcgagcgcgacgatctcaccgcgcgtctcggtctcgtagaccttcttcaatccctccacgacgaccgccgaggtcaagcttccacccctcctccagcacgttgaggagctcgcgcaagacacacaccacgtccgatcgtacggtcctacgtgcggtcatctcgttcaagaactcccgcaacacgaggcacgtcacgagctcgttcctggagatcccgagccgatccgcgacctcgtccagctccctcacgaggtcttcggggagctccaacgaggtcgataggcgacgaccgctaccactatcggccagctcccgtagcattactcgggtgagctcatcttccaaacacttacggacgtaaccggccacgcttccgtgttccctctggatccaccggtgcacggggcccggcagccgcaccgtgatccgcgaacgccctgcaccatatggtttaattattaaatcactatggcaatacctatgcatgcgatcccatcgcgtgttgagggaatcgagttggggccgctcggagtcgaggtcgagattctcagggagagccacgggctgctttacccttgggcgcgtcttctctccgagacctcattcgcggtgatcatcgcggtcctaggctggacgtatctccgggaccgacgcacctcgtacgtgttggcgaccaccgtcgtcggtacgctcgtggttacggtcgtcctcaaagggctgatcggcgagccgagacccttcgtcctccacgtggtttcaccgctcacgaacccggacgagccctacgggagcttccccagcgggcatacctcccgttccttcgccctcgcggccgcgtaccacctggagcgtcgggacgcgctcaccgcgatcctctggatctgggccgcgctcgtgggatgctcgcgggtggtcctcggtgtgcactggccgcacgacgtgatcggaggggccctcgtcggtatcacggtcgcggtcgccacgcacaggaccgcccggttgtgggttaggtttctatcgattgtcgacccgctcgcccggggcgttcgggcttggcgatggtacgtgaggtgatcgatttcgtggaagagctggccccaccggacctggccgaggactgggacaatcccgggatccaagtctgtcctcccggcggcctggacaggaaggcggagcgcgttctggtcgccctggacgccacccacgcgctcgagcgagccggggacgcggatctggtgctaacccaccacccgctcctgttccgaccccctaggaggatcggcggccgctggtaccgggtgctccgggcggtcttggaggcggacgccgtgttctacgcggcccacaccaacctggaccgggccgagggtggcgtggccgatacgctcgcccgccgtttgaacctgcgcgtcgagcgcgaggcgtgcgacgggttcgggcgtctgtgcgaggtgcccggatcggaggaggagttgctcaacgcgctccggaacctctcaccgctgaccacggtttacggggactgggagggcgtcagtcgggtgctcgtggtgcccggggccgcgccggacggactcgtgatggagtgcctgcggtgcggtgtcgacgctgtgatcgcgggagagatcaagtaccatacgcgggcggagctcttggaggaggggatcgccgtggtcgagctgggccacgagtacagcgagctgcccggtgtccaggagctggcgcgccgcgtgcgggaggagtttcgggatctgaacgtggaggtggtgccgccacccgacatcacgatcattcggtgaccgcgtcgctacggtgggatgcgcgcgttccccggtcgacgccgtcgtcggtgttcgagagttgggaatccgcggctccgcccccatatcgggatcccaccgcgtaaaaggtaagtccgagagtcggcggtcggaggccccgcacccctcggacttcacgatgatccgatgatgtgcttacagcacgccgaacattccgtgacgaccacgggagcggctgagggtgaccggattggagaggaagatcctggtgatcgtaggagacggaatggcggatcgagccgtgcccgagctcgacggaaagaccccgctccaggccgcagacaccccgaacatggatcggctcgcgagggaagggtcggtgggtctgctcgacccgatccggcccggagtgcgcccgggtagcgacaccgcacacctcaccctgctcggttacgacccgttcgaggtctacccgggacgcggcccgctggaggccctgggtgcgggtgtcgaggtgagaccgggcgacgtggccttccgctgcaacttcgcgacggccgaggagcggaacggcgagttggtcgttgtggaccgtagagccggtcggatcaacgaggacgagggtactccaaagctggccgagactatcaacgaagaagtcgatctcccggtcgagttcgagttcaaggaggccgtcggtcacagggccgtcctggtactgcgaggcggcgacctctccgccgatgtcacggacgctgaccctaagcgtgtcggcaagcccgtgaaggacgtgaaaccgacctcggacgacccggcggccgcccggacggcggagatcgtcaacgagttcgtccgtaaggcgtacgaggtgctaaaggatcacccggtcaaccgggagcgggagcgacagggtaagccgccggcgaacgtgattctcccacgcggagccggccagctcgaggaggtcgagccgttctcggaccgctacggcatgagcggggccgtggtcgcgggtgcgtccctgatcaagggaatcggccggatgctggggatggacgtgcccgaggacgaggcgatcacgggtcgtaaggacaccgacctgaagaggaaggccgagctcgcgctggaggccctggacgaccacgacctcgtgctcgtcaacttcaacgccgtggacgaggctgggcacgacggtgatgcccgcggtaaggtcgagatgatcgaacggatggaccgggagctggtgggcacgctcctggaggggatagatccggaggagacggtggtgtgcctgaccgccgaccactcgacgccggtggccgtcggtgatcacacggccgatcccgtgcccgtggcgatctggaccgcggacgcgcgacgtgaccccgtggaggagtacgacgagatctcggcggcccgagggtgcctcgggcgcttctcggggctccacctgctgaacgtgctccgggacctggccgaccgcatcgagaagttcggggcgtagtcggatgtcgatcacggagacgctcgtggcctacttcatggacttcgagcgggccatgggtctgccagggatgctcgtgatcaccgccctggagtgtagcgtgctccccgtcccacccgaaccgttcgtgtttccgttcgcgatgcggatggacccatgggtcctggcaacgctcgtgaccctctcctcgatcgtcggtagcttgctcgggtatgcgatcggttacttcggcgggcgaccgatcgccgtcaggctggtgggcgaggccaacctgatgagggtcgagtccaagctgaccgagcaccgattctccgcctggaccgccgtcttcctggccggcctcttgcagttcatccctttcaagccgttcacgatcggcgccggcctggtggagatggacctgcgactatttataactgcagtcgtgacggggcgtttctcacggttcttattcttggggtacgtggcccagtccgagaccgtccgcaactggatctcctactacctggggcctaaggccctgaagatgctcatgagtacggggtgacctggaatggtcgacgttctgatcgttctgggaagtaggagcgatcgagacgtcgccgagaaggccgcgaaggtgctcgaccgagccggcgtcgactacaacgtgcgggtggcctccgcccaccggacgccggagcgtatcgacgagctgatcgaggagtacgagcccgacgtgaaggtgtacatcgcgatcgcgggtctggccgctcacctcccgggtgtgatcgccgccaagaccctgaagcccgtgatcgccgtgccggtggaggcgaagctgtgtggtctggacgcgctcctctcgaccgtgcagatgcccccgggtgtaccggtggcggttgtcggcgtggatcgcggggagaacgcggcgctcttggccttgcagatcctggcactggaggacgaggacgtccggtccttcctggaggagtaccgggaggagatgaagaagcaggtggcccgggacgacgacacgatcaaggagcgtttccggtgacgcagtccgccagggcgttgaacgccgccaccgcgagcggtgtcccaccgcggaccgagacgttcgtcaccaccgggattccggcgtccatcgcggctcgcttcgcctccatcgcaccgatccccactggaaacaggaccgccaccgcgatcgactccgggtactcggcgaccttctccgcggccgtcggggcgttcccgacgacgaccgccacgttccggtgatcctccaggatcttgcgcataccgtccccggtcacggtgtcctcggggatccgctcgccgacctccgaggcgatgacggtttccaacccgagacgctctaccgaccgacggatcccggccgccaccatgcccacgtccgccgctaccacttcggcggacttcagaccctccgtgacggcttcttccgagggctcgatcatcagggtctccgacacgaacgggtcccacgtggcgtgggagaggcggagagtgaggaggtcctctaagttctcgggctcaccgagcttctcggtccaccgctcgaggctgcgctcggcgatcgaacggccccgacccgtccgctccccgagggtcaccgcagtacggccccttcgtcggccccgcggacgagctctcggtacctcctcaagtaccccgtgacctcgtcctccgggggctcccactcctccaacctggcctccagctcctcgtcctcgacgtccacctcgagccgtcgctcccgcacgtcgagccggatcgtgtctccttcctccacgaccgcgatcggtccgccccggtacgcctccggtgacacgtgtcccacgcacggaccccgcgtaccgccggagaaccgcccgtccgtcacgagcgccacggagtcgtccagtcccattccgcacagcgccgccgtaggtgtgagcatctcacgcattccgggaccgccggcggggccttcgtatcggatcactaccacgtcacccgggtcgatatcgccacccagtatcgcctccgtcgcctcctcctccgagtcgaacaccaccgccggaccctcgtgctcatacatctcctccgagagcgccgccgtcttgatcaccgcacccttcggggcgaggttcccgtacaggacgacgataccaccttcctcgtgcacgggatcctccttcggccggatcacctcgcgatcctttacctcggtccgttcgacccgttcccgcatcgatcgacccgcgaagtcgatcctgtccaggtgcaggtcgtccgccagttccttcatgaccgcgggaacgccacccgcctcgtacaggtcccgcatcgtgtagggaccgcccggacgcatcgcgcacagatgcggcgtctcccggctcagctcgtcgaagtcgtcgagggaaagctcaacgtcggcctcacgcgcgatcgcgagcaggtgcagcacggtgttcgtgctcccgcccagcgccatgtcgacacggatcgcgtccaggaaggcctcccgcgtgagtacgtcccgcgcggtgatcccttcctcgatcgcctccacgatccgcatacccgtaagcttcgcgacccgcagcttctccgcctccgtcgccggggtcgccgcgcagttgaactccgacatccccagcacctcggtcatgcacgccatcgtgttcgccgtgaacatcccggcgcaggatcccggtcccggacacgcgcgctgctccagctcctcgagttcttcctccgaaatctccccctcctcgtacgctcccaccgcctcgaacgcgtcgatcaagtccacccgctcgccgtccacgcacccgggctccatcgggcctccggtcacgatcgccgcgggtaggtccagccgcgctgccgccatcagtgcccccggcaccatcttatcacacgagacgatcgccacgaacccgtcgaaccggtgcgcctcgattacggtctcgatagtatcggccacgagctcacggctcgggagggaatatttcataccgggcgtgttcatcgcaataccgtcgcacagggcgatcgtctcgacctcgaacggcaccccgccggccatccggatcccggccttgacggcctccgtcaccttgtccaggtgcatgtgtcccggaacgacctccgagtacgtgttcaccaccgcgacgaacggtcggtccatctcctcgtcagtgagtccgcacgcgcgaagcagcgcccggtgcggcgtccgttcgacgccctccttgatatcaccgctgcgcaaccggaaaccccccggccgaccccggggcgcgtaggttaaacgcttatggctggggttggaggccttggacccgtacggcgtgctcaagggcgtgatcgagctattcgtggtcgtcgatcccatcgggaacgtgccggcgctcctcgcggtcacttcggaactccgaccccgggaccgcgtacgcgtcgtccacagggctgtcgccttcgccgccgtgctcatcctcggcttcgcggtcgccggcaaggccaccctcgattatctcgggatctccgtcgaggcactcatgatcgccggcggtatcctcctgctccgcgccgccttcgggatggtcgagggagatcccacgggcttccgcatagaaccggggtcacacatcgacgtggcttatgtccccctcggaacgcccctcctcgcgggtcccggcgccatcgtcaccgtgatcgtcatgctccaccgtcacggtcgcctcgagacgatactggcctgcctcatcgtcatgctcctcaccttagtgaccttccgagccgcggagcgtctcgctcggttcctcggtcgctccggcatccgagtcctcacgcgcgtcatgggggttctgctcgcggccatcggggttcagatggtcctcgacggcgtcagcgccttcgtacgggggtgaccgcgtgcccgccaacttaccccccgagtaccacgagctcgaggagaagtaccggaaggcccgctcccccgaggagaagctcaggatcaccgaggagatgctcgccgtcgttcccaaacacaaggggaccgagaacctccgcgccctactcaagcgtagactcgccaagctccgcgaggaggtcgagaagcgccgtcagcagaagtcgggtggcggacccgattacaacgtgaagaaggagggcgctgctcaagtcgccctcgtcggaccgcccaacgccggtaagtccgcactcctccgcgagctcaccaacgccgatcccgacgtagcctcctatccttacacgaccaaggagcccgtacccggcatgatggagtacaaggacgttcagatacagctggttgagatcccgccgatctacgaggggttcacccgcggtgacggctccaagttcgtcggtgtcatccgcaacgccgacgcgctctgtttggtggtggatctcaccgaagatccggtcgagcagctcgagacggtactccgcgagctcgagtcggcggccattaagctcaaccaggacccgccctccatcaccatcgaggaacgtgtcaccggcggtatcgagatacgcggcgaggaccgcctcgactgcgatccgaacgacgtcaaggatctcctccgcgacgccgggatccacagcgccgtcgtcgtcatcgaggaggacggcatcaccctcgaggacatcgcggacgccctcgacaagcgtatcgagtacaaacccgccctcctcgtcgccaacaagggcgacgcgccgggctcgaaggagtcgtacgagcggctcgtggaacgcgtcgaggacttggagttcgacctccccgtcgtccccgtctccgccgagaagggtatcaacctggacgagttcaagcgtcgcctctacgacacgctcggtatcatccgggtctacacgaagaaacccggtgggaagccgcagaagccgcccatcgtcctgcccaagggtgccacggtcgaggacgtcgcccgcgagatacactccgacctcgccaagaacctcaagtacgcccgcgtctggggtaagtccgtcaagaaagacggtatgatggtcgggcgcgatcacgtcctggaggacggtgacgtcgtcgaactccacgggtgaggaccttgagggtcgccgcgtgtgtgctcgcggccggacgttccacccgcttccgcgaggccctcgaggagcgcggtgaggagcccgtgagtaagctcgtgtatcccgtcgccggcaagcccatggtcgcctgggtcgtcgaacgggcctcccgcgtcgtcgacgagctcctcgtcggcctcggttacgacgccggattagtctgggacgtcgtccggcagcacgcgaccgtacccgcccgccccgtcctcaacgatcccgtcgacgttcccatggcccgcaccgccgctaacctcctccgacgctccgacgccgacgtgagtctgatcctcgccggcgatcagcccaccgtcacggccgagaccatgcgtcgtctcgccgagaccgccgccgaacacggagcctccgtactcgatcgtggtgccccgaacgaggaggtctccggcgacgacctcctcggtcacgggccgccgctcgccctccggaaggacgtcgtccccgagttcctggagacgatcgaggagctcgccgccgacgtccgcggtcccaacgccctcaacctgaacccggtcctgcgggagtgcggtctggctttccgagtcgtcccgccccgagacgacgccgaactcctgaacgtcaacaccccggacgagcttccagaggtggagcgcgcgcttctgagatccgattagtcctcatctcgcttctccttctcctttcgacgctcttccgcttccaactcccactcgacgcgccgctgcgctcgcctgtactcccctaccgcctcccctatcgcacgtgccagctctggaagcttcttcgggccgaacaggagcaatatcaccgccaggatcagcagcagttccgaggtgcccagcccgtctatcatcctcttttcactcctttttcgcggttagtacccctacctcgtagaggatcatggacggcccggcgcagcatctcgtcggaggggaactccacgctcgacgtgagcgccacggccactaatgacctcagcactctcctcctcagttcctccacgtgggacctcagtgggagctccggagttcgtccaccccttcttcaccaccttcacgatcgcgtggggcgcgcaggagttgcacgggttgaagctccgagccgccctgcatgcgtcgccgagcaggaagcgctccgactcggataactgacgcttcgcggccgccaacttctcgtccacgtagaccctctcgcccaccatggactcctctatcggcgcgtggttcaggttcgtcgacgtgattatctcgtagttgaacaccttaccatccgatccgacggacaccctgtggaccagagtacccctcggggcctcgatgacgccggtaccggagcacccggagcggcgcgagggatccttgtacgtggtgcccgtggtggggaggtcgtcgatccagtgtaaggccagacgcgtcaggagcaacgcctccagtatcctcgctatgttcctgttacgggcacacggtttcaagagttcccacacgtctacgtccagtttctcactccacgaatccaggaaccacctgacggtttcatccccggccttgtaagctaccgctaaacctggtcaacggtcccgcctcacacgcgtacttggtaccgttccactcgtaatatccgacttcggagtaggagtagcaccgctcgtccaggttcgatccccgagccagcgttatcttacccaccctctcggggtagaacggcaccagtcgggcacgctccacgctccccgggtccttggtgtcggctatcagtacgcctccggacgccgccaggtacgagtggacgtagcctgaggctagtccagaatagaacggagtacccgagctgatcatgtgagcgggacgatcgccgacgtcgtccggtaggtgcatgctcaagtacttccagagggtcggtatcaccgactcgaggaaggaccgcatcgactccggcctggtcctcacggtcgagtagaggcccgacaacttctctacgtctcccgcgtagccacccacgcacacggtggcgagatgcaccgacttacccgtgaagacagccaccaacgcctgcgcgtcgccgtgatactttacgaactgatcgtagagattgtcgaccacgctatcgggtaggaagtcccccgagatcagcaacgaccacagtaggtggtcttgaatactgaggcttgaatactgataggaactgcccaattttccaggcggcggtaaggaggaccgtgtcgtacgcgtcctagacggcttaaacggagaccaaacagtgggctaagtcccgtcccgctcgatgttcctcccgacgactacaccgttctcctccagcggtaggagttactggtttcaacccgtacggactcaaacggttcactccggccgtccatgcgcagttgcccactactatcgccgtattagaaatttcccgtgcgtgttccacaactgtctcaaatcgtgagttgtggaccttatacttcctgtgatcggcgtaacgtctacactgctcagtcggagaaaaatcatctaaggaccgatctgtgaaaccgggacagtaaatcaatgagcgcctgagagtcccgaacgcgggatccacgttggcgaggccttgagatcgataccgatctcggccagcgtcgtggtacaacctccacacgaccctccgaagacgaggaccacggacctcgggacggatctaatcagcgcccgaacgggttcctccgacaccaggacggacaacacgcctgtgaacgcgagcttcaggaacgtcctcctgtcgataggtgtttccaataagccatcgaggctcaccgagcacactcgccccgccctcttcatccggatatttgaggctttaccgttcggtcttcctcgaatgtgtgcaaatcgagcacagtgtggagatcccaatccccgatctgtatggacggctccggtagctcgtgccgctcctcctccctcatcctcagtgcaaccgtcgggtaccgttcgatcagtcccaccgccaattccaccggtggtcgcactgcgtagaccaggtcagggcgcagcacccgccgcacccatcgcgacttttcgacggcgtccacgttgaccgaaggtacctcctcctccaacgcccgtcggacgtgttgtacatctatctccaccccccacgcgtcgatcccggccttcagcagtcccttgaggtaccgcaggttcctcccgtggcccacttccaccacccgtcgtgcacgcagtcggcgtacgatcgtcaggaggccctccatcctcgacctcccaaacgtttcgatcaccataacgtttcgtagacgatcggagtccgagtggcgggccggagatcagtccctccagggcggcttatcggggttcttcttgaccagctctagcaggccaccctccctccaggcctgcagcgcgaactcgggaggctcgcgcagcggtacctcctccgaccccgcccggaggaccagctcgtctaggtccacggtgacccggttaccgtcctccactacctcggtgggatcctcttcggcttcgacggtgggcagcccacggttgatcgcgttccggtagaagatacgagcgaaggatctcgcgaccacgcaggcgaccccggcctgctggagggccataactgcctgctcacgggaggaaccgcagccgaagttcttcccggccacgatcacgtcgccctcgcggaccttctcggggaactcgggatccgcccccgtcatggcgtagcggccgagctcgtcgtaggagaccctcctcaggcaacgcccggggatgatctggtcggtgtcgacgtcgtcgccgaacacgtgcgctctaccgctccacctcacgctcctgcccccgtatcctctcgaggtgcgttttgaagtagtcgggtgagtacttgagaactacgacgcgcgacgcgatgagtacggtcaacatggcggtcaccgagagcatctccatgggccgtatggtccctcgatagtacttcaggaacgtctcccggaggatcatgatgatggtgatgtcgacgacgtaccgcagcggcacgcgccggtggcgtagggtctcgagtacgctctggtagacctcgaggagcaggagcacgtcgaatacacattccacgatgaggccgaaggtcatgcggaaacggacctgataggggctggtaaggaacgtgctcacgatgtcgtaaacgcctacgccgaagatgaagagggtgatggcgagaatcgagatcattacgatatgtaccgtgatatcgaggaacttgtatgcgaaccggttcagccgttcgctcaagacgctcaccctaggacgtcttggggatcgaccagctcgccctccgccgcggcgacagcggccgtcacgggactcgccaggtatatctcggccctgcgggagcccatcctacccgggaagttccggtttgccgtggagacgcagacgtcgtcgtccccgagcactccgaggtgctcgcctaagcagggtccgcagccgggtggggcgatcatgacgcccatacggatcagtttcagggtcagcccggcctccgtcatacgctcgagcacgcggcgggacgcgggcacgaccacgatccgcacatcggggtgaggaccgtcaagttcctccagaatctcggtgaagaccctcacgtccctgtagcgaccgttggtgcaggaccccacgaacacccgggtcacctccacgccttgaacgtcgcccactggccgcacgtcgtcgacgcggtgtgggaccgagaccacgggctcgacctcggaggcgtccagctcgatcacctcgtccgcgtccccgggtcggagctcctcagggccctccttcgggggcacgtacgcggacttcgccccggcctccgtggcgagattacacaggcacatacggtcgccgagcgacatacgctcggggagccccgtgtactcgaggaccgcgtagtccgcgtaccctgcgcccagctcgccgaccacggtcagggccaggtccttggcggtggcgggttcctccagctcgccctcgacgtgcacccgcacggtcctcgggacccggatccagagctcgccgtagaggagggcgaaggccatgtccgtgcctccgaacccgaacgctagggcggaggcggctcccgaggtaggggtgtgggagtcgccgccgaagaccacccgaccgggtcccgcgtacccctcctcgacgagcacctgatggcagacgccctcgtccacgtggacgtgctcgatcctgtggcggcgcgcgaactcgaggagctcgttctggcggttcgccgcctctaccgagctggggggtacggagtgatcgaagatcagaacgactttctccggactctcgacgcgctccacaccgagctcccgcagcgtcctgagggcggtcgcaccggacccgtcgtgcagcatgattacgtcgggctccacgtacacggtctcgccggcctcgacgggctctccaaccttctccgagaggatcctctccgcgacggacggcacgttcgcttcccccctccgggggatggacgggattgatcgtgatacggtcccggcaggaggactgcaggaagctcctccgtcgggcgttgtgcgaggtggtgctgcgggaggtcggtcacccggccttcgcgtgtcccaccggggggccaccttactgccatcctcgggacgtgggtaagtaccggccgcggggttacctctcgatgtgggacctcgaggcggccggtagggtcctggagttgggccgccgttacctgcgcgaggagggtctctacgtgacgtgcctcgtatgcgacctcctcggaccggtgggcaggtgcacgctaccggtggaacccttggagcggtcgggacggcgcgtctcggggttacggatagcacccaccggggacgaccgacgggacgggctggtgagactggccctgagatggctcgccgcgaacccttcggcgtcgatcgaggggtcctggcccggcaagacggacgcgttcctggagtacgcggaggaggcccggaaactcatcgactacctggatcgtctcggtcacctctcgattccagcacattccggacgatctcctcgagcttggagtcggtgaccctgacacgccggtccccgagcgccttgatccgcttgaggacctcctcgacgatctcctcctccggttccacgcccagttcctccaacttcgcgaccaccgccttccgcccggtgtgcttaccgaggacgatcttccggttcatacccacctccttggggtcgatcggctcgtaggtgcgcggctcctccagaaccgcggccacgtggatcccggactcgtgcctgaaggcgttctcgcccacgacggccttgttcgggggcacgtcgataccggagtactccgagaccttcctcgagagctccgcgagcacctcggtgttgaaccccgggtcgatcccgtacagctccttgagggccatgatcacctcctcgagggctgcgttacccgcgcgctcaccgataccgttcaccgtggtggagatcgcctgcgcccccgcctcgaccgcggccagcgagttggccacggccatgccgaagtcgtcgtggcagtgcacgccgatcggcaggtccacgacctcgcggatcttcgccacgaaaagccgcatcgccgccggtatcatgacgccgacggtgtccgtcgcgtggacgcggtccgccccgcactcctccgccgtccggtacaccctctccaggaactcgaactccgtcctcgtcccgtcctccgcggagaacgccacccacagcccgtggtccttcgcgtactcgaccgtgtcggcgatccgctcgagtacctcctccctcgacatccggagcttgtgcttcagatgcagctcggaggtggcgatgaaggtgatcactccgtccacgtcgcagtccaacgccgcgtccacgtcaccacgtagcgtcctcgccaggcatagaatgtcggcgttcagtccctcgtgcgcgatcctacgcacggcgtcccgctcgccctcggacaccaccgggaacccggcctcgatctgctgcacgcccagctcgtccagtaggtgcgcgatctccagcttctgctcgggcgtgaagctgacacccggggtctgctcaccgtccctcagcgtcgtgtcgtagacgatcacctcgtccgggaggtccatctccctaacggcttcacgtacgtacggactctgcacgtgctcacccctccaagtcgtacgcgacctctaaccgctccagggttacgacgcccacgccgagacgctctttgaggagctccagcaggcgctcgaccttctcccgactgtccaccacctcgacgaccacgggcaggttcatcgacgtcctgaggatgcgcgcctccgagcgcccgcggcggccgcagcccgcgaagcagcggtgcacggtggcccctctcagtccgagctcgcgcacgcgttcgaggatccagtccaccgcgggcaccccatcgaccttgtctccttccaacaggtacaccttcagtttcaccggttcttcgatcttcctgaccaacctcacgccctccccgaccataccacgtgcgccgccgccatgccgccgagcacggccgcgatcccgagcacgacgttagctgttaagtaaagaatggagagtaccggcgaggccttcaacagctccacggtctcgtacgccatcgtgctcagcgtggtgaggcccccgcagaaccccaccgtcgcgagcgcgcggacctctggggagagccgcaggccgagcatcgtcgaccaggtgaggaaccctaggacgaacgacccgaggacgttcacgaggaccgtccccatcgggaacccgcgcacctgcggtacgagaccggacagtaagtagcgacagaccgcccccagcgcgcctccgatcgccacggcggccagctcccgggccccgatcttcaccacccctcctcagagcatcttggctgcgagcggcacgaggagcgcgatcccacccaacagcagacacactttcgagaagtcgagacgtctcgccacccgcagcagcacttccatgcagatcagactcacgacgaaggacaccccgatcgccgtcaccatccacgacgtgcccattttcgtggccgcgctcagcccctccttgagctctaaggccgtcgcgcccagcatcgccggaccggccaggtagaacgacagccacacggcctctccaccgtcgaacctacgccagagcaggagcgccatcgtcgtaccggaccggctgatccccgggatcaccgagaacccctgtcccaggcccacgatgacggcgtccacgacgttgacttccctgcgatccctcagcccctcgggcgatatccgcaggaggagtcccgtgacgatcagggcgcctccgatggccatctggaccgcgtctcccgtggcggccgagaagatccccttcaacaccttgtacaccgggagcccgacgacggccgtacagaccgtggcgacgatcgcgaacaatcctaatcgccgccacggcccgcccatcagcaggtccctcaccgtcagccagtacgggacaccgaaccgtaacagcacggcgagcagcgtgccggcgtgcagccagagcgccaggtccatcgcggtcgagggcgggatcccgagtaccttcatcatcgtcatcgtcgcctgaccttcgctgctgatcggtaaccactccgtgataccttgcaccacgccggccaggacggcggtccataactcgatctcccgcaccccctccgccgccgcgaccgcccgaggttaaatctctgttcggaatccggagtcggaaggcgattaccgtaatctgacgccgcgggtcgggtatctccacgagcggtcggaaggtccgattcgccgttcgacgtcgaagcccgcgtctgcactccgtcccggtcctcgggcccttcgcggaaaacctttccgacggtcgcgatcacgctcctgggggcatcgggttgacccgcgcggtggtgaccgtgatcggtgcggatcgacccggtatcgtcgccggaatctcgagcgtcctggccgaacataacgcgaacatcgaggacatctcccagacggtactgcgcgacctgttcgcgatggtcatgctcgtcgacctctccgaggccgacgtgagcgtgggtaagctgagggaggagctccaaaaggccggcgaagagctcggtgtcgacgtgatcgttcagcatgaagacgtgtaccgcgcgatgcaccgggtgtaggtcccatgtccagtctggacgtggaggaggtcatcgaaaccatcgagatgatccggatgcggaacctcgacgtccgcgcggtgacgctggggatcaacctcctggaccgcgctcacccggatccggaggagctggcgcgggacgtccgcgagaagatcgtcgaggtcgccggtgacctcgtggaggtcgtggaggaggtggaggacgagctcggagtgccgatcgtgaacaagcggatcgccgtcacaccgtgctccatcgtggccgcgtccgccgtccggaaggagggacgcgaggccgtcctgaccctcgcggaggcgttggacgaggcggcggaggaggtcggcgtcgactacctcggcgggtacacggctctcgtctacgacgggttcacggaggcggacgaggccgtactggacacgatcccggaggccatcgaggggacggagcggctctgcgcgtcggtcgtggtcgcggacgagcgctacgggatcaacatggacgcggtgtacaggaccgcggaggccgtcaaggagaccgcggaacgtaccgatggacacggttgtgccagactcgtggcgctgaccaacgcccccgagaacacgccgttcatggctggggcgttccacggggtcggacagcccgaggcgtgcgtcaacgtggggatctcgggaccgggtgtcgtccgggccgtcgtcgaggagctgaaggacgtcgacttccggacgctgcacgacgagatcaagcggaccgcgttcaagatcacccgggtcggcgagctggtgggccggcgggtggcggagcgcctcggggtggagttcggggccgtggacctgtcgctggctccgacccccgaggagggcgacagcgtcgcggagatcctggaggggatcggcctcgagtcgtgcggttgtcccgggagcacggccgcgctgcacctactgatggacgctgtcaagaagggtggagcggccgcgacctcgagacacggcggttacagcgaggcgttcatcccggtgagcgaggacgccgggatggcccgcgcggcggaggaggccctcaccctcgagaagctcgaggccatgaccgcggtgtgctccgtggggatcgacatggtagtcgtacccggcgacaccccggtcgagaccatcgccggtatcatcgcggacgaggcggcgatcggcgtggtcacgggcaagccgacggcagtcaggatcatcccggcgccgggcaaggagcccggggacgagttcgagatgggcggactgctcggccgggcaccggtcatggacgtctcggactaccgacctaccatgttccgcagggacggtcggataccgcctaagttcccacgataacggccgatgacgagcctgccccggcgggatcggtgacgaggattggcctttccgaggcccgacgggggtgaacgcgtcgccgaccgtcgtggtaatccccggggacgggatcgggccggaagtcatcgacgcggccctgaaggtcgtgcgggcggttctgggtgacgaactcgagatcgtggaggaacaggccgggtactcgctgtggaagaagaggggagtcacgatcgaggacgagacgatcgagcgctgccgcgaggcggacgccatgctcttcggcgcgtgcacgactccggaggacccggaggccaagagtcccatcgtgacgctgcggaaagagctcggactctacgccaacgtccgtcccgctcgctcctggcccgtaccgcgacctgtcgacaccgagttcgacctggtgatcgtccgggagaacaccgagggtctctacaccggatgcgagtgcgagatccacgacggtgttaccgtcgccctgcgtaagatctccgaggagggtacgcgcagggtcgctgaggtcgcctgcgatctcgccgaggagcgctccggtcgcgtgacgatagtgcacaaggccaacgtgctgaagctcacgtgcggaacgttcaagcgcgtcgcggcggaaaccgtggagcgtcgcggtctggagtgggacgacgagtacgtggacgcggcggcgtacaagctggtgcgtgagccggacagcttcgacgtgatcctcacctccaacctgttcggggacatactctcggacctggcggcgggtctgatggggagcctcgggctcgcacccagcgcgaacctgggggacgacgccgccctattcgagcctgtacacgggtcggcacccgacatcgcgggtaaggggatcgcgaacccggtggcggcgatcctctcggccgccatgatgctggatcacctcgggtacggggaggaggctcggatcatcgagcgtgccgtcgaggaggtgctgcgcgagggcgtgaggactcccgacctcggcggttccgcgaccacggaggaggtggccgaggcgatcgcggagcgtgtggctaccgggtgagcggggggcgtagggcgaccggctcgtacctgggatcacccccgagctccacgagggccacctcgggtagctccttaaccctgcgtgcgaactcctcgctgcgtccctcgatcagcagctcggctagctccgaggcgagctcgattctatcccggaagcagcacctctcggtctcggccacggccgggtcgttgaaggtaatcaccacgggttcttccccaccgagcctcctgccgacctcctcggatcgcacctccaggtacgtcgggtcctccgtgagctccagcacccgggagtccgcgtcgtacctgacggtgtccccggaaaccgactccagccccctcgcgctctccatcgcgagccgcaggaggtcccgacacgtcgcggaccggaagaccttaacccgggggcccttggacattgccgatcaccccgcgcaacatcgtccgacacgagctcattggcctggagtgtcgggtggtgaagtcgctcgggcccccgtacgagggcctggaaggcaggatcgtggacgaaacgaagaacaccctggtgttgaagacggagtccggtgaaaaggttatagtgaaagatcaggtgctgctcgagctcaagcttccgtcgggcgagagggtacgcgttgacggtgccctgctcgtgggtcgtccggaggaaaggctttctaagcggatcaaatacgcggaggtcgtgcgcggtaggttcgatccggaggactacctggattgacgggggagtatcgaatggcgaaagacatcgggctcggcgtcaagccaccgcggagggagtgcgacgatccgaactgcccgttccacggtaacctgagggtccgtgggatgatcctcgagggtgtcgtggtgagcgaccggatggacaagaccgtgatcgtggagcgcgagtactaccggtacgaccggaagtacgagcgttgggagcgtagacgctccaggatcccggcccacaacccgccctgcatcgacgcccaggaaggtgacaaggtccggatcgcggagtgccggcccctgagcaagacgaagagcttcgtcgtgatcgaagtcctcgaacgtgcacaggagaggtaggggtgagccgccgtgaaggcgattaaggcgaagtccccgcatgccgcgctaccggtgggcgcgcggctggtctgcgcggacaacacgggtgccagggagctccagatcatcgccgtgaagggctacaagggcgtccgtaggaggctaccgaacgccgggatcggcgacatggtagtgtgctcggtgaaggaaggtactccggacatgcgaaaggaagtcgtgaacgccgtcatcgtgcgtcagcgcaaggagtaccgccgtcccgacggaacgcgcgtgaagttcgaggacaacgcggccgtcatcgtgacgccggacggagccccgcgaggctccgagatcaggggccccgtggccaaggaggccgcggagcgctggcccaggatcggtagcatcgcgagcatcatcgtctaggggggacgtcacccttgcgctggacgaagtccagtcagccgaggaagcagcgtaaggccttcttcaacgccccgctacacaagcgccagaagctcatgagcgccacgctccacccggagctcaggaagaagttcaaccgtcggagcctgccggtccggaggggagacatggtcaggatcatgcgcggtgacttcaagggtcacgagggcgaggtcgtcgaggtggacctgaaacgcctacgtatctacgtggagggtgccacgatcgagagggcgaacggagagaaggtgtactacccgatccacccctcgaacgtgatgatcatcgagccgaacctggacgacccgatgcggcgtaagatcatagagcgctccggtggcacccccgaggtcgaggccgtacccgagaagtccgaagaggagaaggaggagaaagagaaagaggaggaaaagtccgaggagtgagggggtgaactcgcttgggtcgcgcgcgtagtggtccgaagcgtcacgtgaagcgtctcgcggccccgtacgcctggccgatcccgaggaaggaaggtggtaagttcgcaccgaggccgtaccccggaccgcacaccatggacacgagcgtgccgctgctgatcctggtacgcgacatgctgggatacgccgactacgcccgggaggcccggaagatcatcacgcgcggtgagatctacgtcgacggcgtggtgaggaaggagccgaagttcccggtgggcatcatggacgtggtggagatcccgcgcaccggggacaggtaccgcgtggtcatgaacgagcaccaccgcctggacgtcgtgccgatctccgaagaggaggccagggtgaaggtctgccggatcaagaacaagacctacgtgaggggcggcaacctccagatcacgatgcacgacggtaagaactggctcgtcgagatcgaggacccgacggacccgaaggaggatgtctacagcgtgggagacagcctcgtgctcgagctcccggagccggacagcggtgagagctggaaggtcgtggatcacatcccgttcgaggaaggtgtctgggtgtacgcgatgaccggccgacactcgggcgaggtgggtcgtgtcgtcgagatccagacattcgagggtccgcaggaggacctcatcaccgtcgagaacccggagggagaccagttccagaccacgaagggccggctcatcgcgatcggtaaggacgagccgctggtcaccgtgaggaaggaggagtagggggagctcccgttgtccgtcgtcgacgaggagacccggcgtaagatcctggaggactgggagagcaacccgatgcggaagccgcgcgtgggtaaggtcaccgtgaacataggcgtcggcgagtccggggaccggctacagaaggcctacgagctcctccaggagctcaccgggcagaagcccgtctacacccgggccaagcagacgaacccgagcttcgggatccgacgcggccagcccatcggagtgaaggtggacctgcgtcgggagcaggcgatcgagttcctcgactggacgctggacgccgtcgacagggagctccacgagtcgcagttcgacgagttcggtaacgtgtgcttcggtctggaggagcacatcgccctcgagggcgtcgagtacgacccggagatcggtatcttcggtatggacatcgccgtgaccctggagcgcccgggcttccgggttatgaggagacgccgctgtcgtcgccccgtcccgcgccggcaccggctgaccaaggaggagggcatagtcttcatggaggaggagttcgacgtggaggtcctgccctgagggggtgacccggaatggcgaggagggagttcggcaagggcgcacgccggtgccggcgctgcggtgacacgcacggagtcatacagaagtacggtatcatgttgtgcaggcagtgtttccgagaagtggccgaaaagatggggttcaagaagtacaactgaggggggttagtgtcgcttgaccttgatggacccgctcgcggacgcgatggccacgatcaagaacaacgagatggtaggtaacaaggagtgcgtgatcgagccggcatccaagctcatcggccgcgtgctgaaggtaatgcaggagtacggttacatcggtagcttcgagttcatcgacgacggtcgctccgggaagttcctcgtcaagctggtcggccggatcaacgactgcggtgtgatcaagcccaggcacccggtcaagaaggacgagtgggagtactgggagcagcgctacctgccggcccgagacttcggtctcctgatcgtgaccactcccgagggcgtcatgagccactacgaggcgaaggagaggggcatcggcggacggctgctcgcgtacgtgtactgagggggaccggaccgtggcggaggccaagttcgaacccgcgaaggacgccattcccggcgtcatcgtgatggaggaacgcgtcaagatcaaggacgacgtcgagatcgagatctcccagcgcgaggaccggcggtacgaggtcaccgtcaagggtccgaagggcgaggtcacgaaggagttctactacccggacgtgtacctctgggtcgaggacgacgaggtcgtgatcgccgccacgaggtccaaccggcgtcagaaggccatcctaggcatgatcaaggcctacatcgagaacatgcagaagggcgtcaccgagggccacgagtacaagctcaagctggtgtactcgcacttcccgccggaggtcaaggtggatcagaaggagggcaaggtctacatcgagaacttcatgggtgagaacgtgccgcgcgtcgccgagatcgtggacccggagaacaccgaggtcattgtgcagggccaggacatcatcgtgcgtggtatcgacaaggaggctgtcggacagaccgccgcgaacctggagcaggccacgtacatcaaggatcgggacccgcgtgtgttccaggacggtatctacatcgtcgagaaggacggcaagaagatcgtgtaagggtgaggtgccttggtccggaacccgaacctctccaaggaggaggagcgcctgctcaagctccgggaggaactcaagcggaagaagccgaagttccgccggcaggagtggcaccggtacaagaaactgggtgagaagtggcgccggccgaagggccgccacagcaagatgcgcaggaagctcaagagcaagccgaagatgccgaacccggggtacggctccccgaagaaggtccgaggcctgcacccgtccgggtacgaggaggtgctggtgtacaacccgaaggacctggagaagatcgacccgaagcgtcaggccgcgcgcatcgccagtcgagtgggtaggaggaagcgccaggagatcctcgagaaggccgaagaactggggatcgtcgtcctgaacgcgtgatccgggttttgttgactcagagtttcacctcgtgcccgtccatgtggacgaccaccccgcgtccctcctccacgtgtcccacgatcttcgcctccacgtgcttcgacaccgtgtcgacgacgtcttcggcctcctcctccgggacgatcaacgccatgcccattcccatgttgaacgtacggtacatctcttcgacgggcacgttccccagctccctgattatctcgaacacgggatgcggctcgaacgggtcgtccagcacgtagcgcacgtcgtctcggagccgcttcaggttctccactccacccccggtgatgtgggcgattccgcgcacctcgtagtcccgcagtacctccatcacgggccggacgtagatgcgcgtcggttcgaggagctcctcggccacggtcctaccgtgcgggagctcgtcgtgcacgtcgtactccgagaggaggaccttcctagctagcgtcaggccgttgctgtggatcccggagctccgcagtcccacgatcgcgtcgccgggttccacgtcctcccccgtgatcgggtccccctcgacccgacccagacaggcgaccacgaggtcgaacccacgtccttcctcctttccgcggatcacctccgggagcgtcgccagctcgccgccgacgatcggggcacccgcctctcgggctcccttgccgagtccctccgcgatctccgcgcagacgtcggggtcgggatcctccatcgccaggtagtcgaggaaggccagcggccgcgccccgaggcacaccgcgtcgttcgcgttcatggctatcgcgtcgatgccgacggtgtcgtaccggccgaccagctgggcgacgaggaccttggaccccacgccgtccacgttgagcgtcagcagttccccgtgcacctcgagcacggcggcgtagtggccgatgccctcgacctcccggcagccctccggctccaccttgtacttctccagcacgtcccggatcgcccggacggcgaacgcctccttgtcgatgtccactccggcgtccttgtaggtcatctcggacaactcgtcgtaccccctaagtgagacggaagcactccaggttctcgggcgccatggaaaagaccttcctgaccgtgcggcgcaggtggttggagaagtacttacacgcgcgcggctcgccgtggttcgtgaagaccttcgacggcggcgacggacgtatcgaccgcacgtatttggtgagctcgatcttgtcgccgtgtccactgaacccgctcacggtctcgacgcggagctcgatccgtagggtctccgtcttgcccgtgggcgtgggcagcgggacctccttggcaccctcctggatctgccttccgagcgtgccctcggcctggtaacccacgaagatcagcgtgttcttgggatcgtcggagagctcgcgcaggtactccaggatcgggcccccctcgagcatacccgaggtcgagaggatgaccgcgggttcgtcgtcctccatgatcgcctggcggtggtccgagccctccacgggctcgaagacttccgaggtgaacgggtcgtcgtcctcgtgtaggatcctgtgctgcaggcggcggttgaggtactccgggtacgccgtgtggatggccgtcgcctcgtaaatcataccgtccaagtacaccgggccctcgagctcgtccttgcggtgcatgtcctccaggacgagcatgacctcctgggcgcgtccgacggcgaaggacggtatgagcaccttaccgcccttcttcagcgtgtcccgcacgatcttcctgaaccggttctcctccttacgacggctcccgtgtcgcgagtcaccgtaggtggcctcgacgaccatcgagtcgacccgcttgaaccggttgtccgcgccctcgagcaaccgggacggggtcgggttgatgtcgcccgtgtacacgaagttgtggcccttgtcctggaggaacacgtgcacggaggccgatcccaggatgtgtccggcgttgtagaaggtgatgctcatgtcgggcgtgatgtcggtgggctcccggtagtcgatcgtgatcgtgcgcttgatgaccttcttgacgtccttctcggtgtacgggggctcctggccgcgcttctcgaggaccttgatgtagtccgtcaagagcaggtacatgaggtcgcgggtcggcggcgtgcagtagaccgggacccggctctcgatgaccttgtgtcggtagaagtacggcaggaagccgcagtggtccaggtgtgcgtgcgtgatcacgatcgcgtcgaggtcgtccatacggaactccgggacgttgaagtgcggataggcgtccgtaccgttcgcggccacgttcacaccgcagtccaggagcacgcggctctcctcggtgtgtaggaacagtgaggagcgtccgacctcctggaagcctcccaaggcgctgacccgggcccaccgtgactcggtgccgcggctccgcgttcgaccgcagaagatccgggcgctgacgttcctcaggaacttgcggcgcgagtcgtccgagagtatcagtcggcgtgtcgtgttcacggtcttcgacgggatcggtggttgcctgtagatccgcggtacccagccggtatcccgggagatcctgtgcacgttcttcccgcgcttgccgatcaccagtccgggtttcttcgagaagatcactacctctccggtgtccaggaacagcaggtcccgttcgctgaccccggcctcctccgggatgatcttcaggatgaccttcttggcctccttggccggggagagcgcggcgggattaggtcttatcttgacacgtttcctcagggctttagccaatctcgtgaccaggtccgaatcgtccttgacgaaggagtgcggtgagttggtgtacaggacgacctcgggaccttcgaagtctacgtcggtcacgacgacgtccgaaggcagcacttcctcgactctctccatgaccttctttttgacctcttccaacgtcttttcgccgcctcttcgctcgctcaacgcatccgcccctggcttcaccggtgatcaccggggtcgattgtccgggggagggggctgagggatcacgagaggagcttctccacctcctcctcgggtagctctcggtacccctcctcccgggtgatggttaccacggtcaccccctcaccggtaccggtatcgcgttcgagcgcggatttcacggcccggacggccacctcgatcgcgtcgtccaacgacatcccttcctcgtactcggcctccagcacaccgtaggccgtcggagagccagaacccgtggccgtgtagtcctcctcgatgatcgatccgctggggtccaggttgtacagcgccggatcgtcgtcgttgaacccgcccacgatgagttgcacgaggtacgggcggaacgccttgaggctcgagtgcagcacgtgcgagatcatgttggccagcgccctggcgctgatcatccggttgtgcctcagctcgtacagtctggcctccgcccgcatgaggtcgacgatcttctgggcgtcggccaccgagccggccgtggtcacgccgatgtagtcgtggatgcggaagattttcttcacctgcttgcccgcgatcaggttgcccatcacggctcgccggtcggcggccaacacgacccctttatcggccagtatgccgacggtcgtggttcccttagtgagctggtccagctccttcatcacgtcactcaactgcaaaccggacaacccctgattccagtttcagtacgttttcgcgatacggacggtgtactcggctgtttcaccacagatcggacacctttcgaattcggtgtcttcttcggggtacggcgtaccgagaacgtctccaccaaactcctcctccatacgtacaccgcagcgctcggaaccgcaccaaccggtctcgacgatcccctcaccaaccagtcttcgtgcttcctccggggagtccgttcggaatatacccttttcgaacttctcgcgggctcgcttccgcagctccatcgcgatgtcttccagcagctcagggacgacgtcgggcagttcttcgaacgcgtacgtctcgcgctcgagctcgtccctccggaagactaccgcggtaccctcctcgagttcccgggctccgagctcgatacgcagcgggacacccttcagctcccagtaatggaacttgcgtcccgggctcatgtcgcggtcgtccaccttgacccggactccctcctcccgcagcatctcctcgacctccgcggcacgttccaggatcttccgccggactcccttcttcagtatggggaccatcacaacctggtacggagccacgtccggcggtagcaccaggccgcgctcgtccccgtgtatggctatcatcgaggccaccactcggtccgatataccgtagcaggtcatgtacacgtactcctggtcaccctcctccgtctcgtaggtgacctcgaacgttctcgcgaagttctggccgagcatgtggacggtaccgatctgcagcgtccgaccgtccggcatcagcgtgtcgaaggccaccgtgtactcggcgcccgggaacttgtcccactccggtcgcaccgacgcgatgtacgggatcccgagctcgtcgaagaacgacgagtagatctccaccgcctccttgacttgctcctccgcctcctcctcggtcgcgtgggctgtgtgggcttccttgaacgtggtgatctcccgcatccggatcagcggtcgggtgtgcttcgtctcgtaccggaaggtgttcacgatctggaatatcttgagcggtaggtcggcgtgtgacctgatccacagcgcgaacatcgggtagatcgccgtctcgctggtcggccgcagcgccagcttctcgtcgagctccttgagacccccgtgggtcacccagtacacctcgtcctcgaaccctgctatgtgctcggattccttcttcagctgggtctccggaatcagcgtcgggaacagtacttcctcgtgcccggtctccctcagcttgcgcctcagcttctcgactacccgctgtcggatctcgaacccatacggtagccacacgtacatacccttaacggggtacctcacgtccattatctccgcgctgcgcaagacctccgcgtaccactccgagaactccaatcgatcacccctcggggtcgacggaagttgagcgttcccaagaaacgcatgcagctcccgagagaggtcgtcgtgggttcgaacgtgctccccgaagttccgaagctcctacgtagcgtcggagtaccggacggagtcgtcgcggtgttctccgggcgaactaccatgaagatcgcggggaacgaggtcgccgaccacctcgaggaagccgggtaccagacgtcaccggtgatcgtcaaggggtcgaccggggacgacgtgaaaaaagctttggaggcgctggacgagatcgacgcggacgtggtagccgcggtgggcggcggtaaggtcatcgacgtggcgaaggtggcgtcgtaccgtcggggtatcccgttcatcagcgtccccacatccgcctcccacgacggcatcgcatcaccgttcgcctccatccgccgggagggacggccgtactccgagcccgcccaggctccactggccatcctggcggacatagaggtcatccgagaggccccggagcgcctcatccgcgccggggtcggggacgtcgtctccaacgtgacggcggtgaaggactggcgactggcgcaccggctcaggaacgagccctacagcgagtacgcgtcctccctatcgctgatggcggcccggatcgtgatgaagaacgcgaaacccatcggcaagctcctcccggaaggcatcaagaagctggttcaagcgctcatcagcggcggggtggctatgagtatcgcgggctcctcccgaccgtgcagcgggtcggagcacctcttcagccatgccctggacgtgatcgcggaacgtccggcgcttcacggcgagcagtgcggggtcggcaccatcatcatggagtacctgcacgggggcaactggcgggaaatccgtgagacgctcgaaacggcgggcgcacctaccacggccgaggacctaggggtaagtgacgaggagatcatcgaagcgctctgccgggcgcacaagatacgtccggaccggtacaccatcttgggggataaaggactgacgcgcgaggccgcggagagggcggccgaggagacgggcgtcattcagtgaaccgctcttcgaacacgacctcttccacggcgtcgtcgtactctatcatcagcttcgcgaacctctgcttcgcccgggcccacgccggattggcggcgtcgtcgccttccaccctgacgcgcagcgtgttcccgtccagctccagctccgcgtcgacggatggcaccatcgtctccagcaggccctccgcccgctccaccgtgtcctccagtacgtccacgacttccacctcgtacaccagcgctttacccgccagcgggtggttgaagtcgaccctcacccgtccaccgtcgacgctgagcacgcgaccgcgccggccgtcgggacttacgacggtatccccgggcttcacgctccccctgaactcggactcacggtacgtccggaccagcgatgggtcacgctccccgaaggccttctccgggggcacctcgacctccaactcgtcccctggttccgcgcccaccagtgcctcctcaaccggttcccataccattccggctccgaccacgaccaccaccgggccggactcgacgttcagatcgtgctcttccgcgacctccttccgtgtggtgtcgattacctcgtcggtgtccttcacgcgtcccgtgtagtggatcttcacgaagtcacccttctcaacggccacgacgatcaacccctcagcatcgcgttcacgagtagttcgacggcttcttcctccgagagacctcgggacatcagggtctcgacctccttcttctccacggtacccagggcggcctcgtgcgtcaaccgggcgcctgggtggaccacccgcagcttgggaacgctgacgaccttcccacctcctttaatgatctccgagcactctacgtgaccgcgggcgccgtccgcctcccctgagatctcaccgaccagctcgacgaacgcgccgtcgatcgccgccgccttgaagtccaggagggtccgcgcgtcctccccggtcaacctgacgctctccactgcccggacgcgatcctccccgacggccctcagcctcgccactccctccatggtggcccgctcctcgacgcgggcgcccatctcccactccagctcgccgacccgaccctccgtgagcctgaactcggtcacgaaggacgcctcgggcttcacggacacgtcgtacttggccttcagccgtacgcctccctccccgtggtagtgcacgtccgtaaccttcacgtccgcgccctcaccgatctcgaactcggcttccatctcgtgcacgacgtcgcgcgctctcgggaacgaacagtgggacatcagctgtatcttcgcctctggctccacgatcagcctcgtcacgatccgctggactccctccggccatggaacccccacgcacatgtggatgggttcgtcgaactcgtacccctccttcaccacgagctcggcgacgacggtgtcgtcttcctcctcggcgttgagctcgaggccctccgccccctgcacgttcacgaccttgttctcgatgatcacgatccgcggcgtgtccggacccgcgtgataacccgtaggcttgaacacctcctcggggctcactccgccccgcacaccaggccacccccgcacatcaggcacttgagcaccacgtccttcgggtccccttcatcgacgatcttaccgtccatcatcaggtaggccctgtcaccgacctgctccgccaggtcgcggttgtgcgtgatcagcagcacggcggagccttcctccctcatggtctcgatgaccttcgccagatcctccatcgacgacatgtccagtcccgcgtccggctcgtccaagatcaccaggtccggtctcatcgccatcacagcggccagttcgacgcgcttccgctcgcctccgctcaggttctcaccgcactcgcggtcccagtactcctccgggtcgagaccgacgatccgaaggcaccgtcgcgcccagtcctcatcgtcggtgcagacggacaggtactcgcccacggtcaggccctcgaacctcgcgggctcctgccaggacattgtcagtcccatcctcgcccgctcgtacatggggaggtcggtgatatcccgacccttgaaccggacctctccctcgacgacctcgtatcccgagcaccccacgatggtcttcgccagcgtgctcttccccgacccattgggaccgatcaggtcgacgatctcgccctcgtcgacggtcagggaggcacctcgaacgatctccgttccgtcctcggattccacccgcaggtctttaacctcgagcagagccaacgtctagggcccccgtacgcccgcgacccgggccctaggaagcgcttcgcgccgccgatgagggcccggcccaacggcccgggacatcaccgggccgaccggccaggtgggatgaggccacctgccgacacccgggcacagggggtctcacacctttacagttactacgcttcctcattcgaaaatcgtagaacaataaaggatctccaccggggctttcccgatgcccgagatcgaggtttacgagatcgaaccggagcggaagctgctggaactgctccgggaagccccgtcagtcacggaggccccggcgtgggacgcggtgtacccatatcaccggcacgaagaaggactgttccgagaggtggtccgcgcggtccgggaggtgctctacgagaccgaagccgcccgggtgtgcgtgggactcgagggtatggatagcaccctgtgcgcggcggcggccgcccgagcctgcgaggagtacggggtggagctcgtctgttacaccgtggggttctaccccgggatgccccgtgagctcgtccacgcccgggcgtacctagtcgcctccgagctcgacagccgctacgagaccccggtctacctgtaccacctcgacgtaccacctccggtcgagtccaagcgcgaactctgccggctctgcggtcggctccggttcgaggtcgcggcccaggcgttcccgggctccgtgatactcgggggcgcgaacttcggagaagccccgcacagggctcgactcgacgcgatcacgcaccacggacaggccatcgagtaccgacccctcctcgagttgggcttcgacaagggtcacgtggtggcggccctccgcgaggtgaacttccacttccccaggctcgagtggtggaagaacgagagcgggtgcggcgtgcgggactacctacgggatcccgaccccgagggggtactggaggctgccgaggccaacgacacgttccaccggatcctgctcgaggagggggcctggtgcggtcaccactacgacacggccgtcgtgctgtacgacggggagcgggtgtacccggtcctgatcccgctgccctggggatggggccgcgacgcccagcgggccgcggaggccgccttcgacgagctcgccgataggtgggaggtggggaacccggaggaggtccaggaggtggacgatccgcccctcgagagcatcctcaagcgggcccggcaactcggcacggttcagccctccacctcgcccaggtagaccacgcgctccccagtctcgaccttcccctcccacgagcgcatcctcgcccggtgcgtcccgacgctcaccggctcggcgaggacgaacgccggggacccccatcggttcaacacgacgagcgtcgtaccgtccgggacctccaccctgggatccagctccagcaggaactcgtccccttcgacccctttgacggcccccacggtctctgatgccatgagcttcaggaaggccagcgcctcgatcagctcctccgcctgggagcggtcccggacccgaaccagctccgtgacccgccgtaggtcgccctggagggctgcgtagaggtcctcccacgacacgttcgaggcggcggagagtagcaccagcatcttgtcctggagtaggtccgacaccaccgcggccagctcgtccaccggctcgacctccacgaactcggagaactcccgcacctccaccccgaggtggtccgcgagcgcctccgccgacgggtgcacccttctccccatcacgagcggtcggtagcccgtgagcttcgcggccacgtacgcctgcctcaccgcgtccacgcccaccgtacccgccttcacctcgacggcgtaccgctccccgtccttctccgccacgatgtcgatctccgcgaccagctcgtcctccagctccacccggtagttcctcgccaccacctcgaagccttccttccgcaggatcgaggccgcgatctcctcggcgctcttaccgcggcggagcaacggaccaccgcccgactcggcaggcggatgtccgatcgtcgatcacccgacgggccccgtactcatcatcgtcaggaccggggtcggatccgggcgtcgtcgttccgaccggtcgaggcgcctgtccctcctcaccagctcggtgaccggggttctcctcatcccgaccccggcatcgggacgtcctcgcgcgggagctcgacgaccacgacggtggtttccccgttcatctccacgtccctgaggacctttttcacctcaccggggtccggtttctcgatcacctcgacctcggcgcccagggactcgactatactcagaacgtcggcgtccagccccatcttggcggccctgccctccttctcttccatcacctgccgggtgaaccctaactccccgttacgggtgacgagcaccgcgatcgggaggtcctccctgaccgccgtctccagctcctgacaggagaccatgaacccaccgtccccggtcagggcgagcgccatctcggggacccgggccgaggctcccagcgccgccgggatcgcgaaccccatgggacagaacgacccggagtggatcaactcggacggggacgacagccgggcggccagcagcgcggtgggggtgatctgacccgagtccaccgtggccggcccgatccaggccttcagtgcggccttcacgacccggtacagctccagatcgaactccggcggctcgcccggctccgggttccacggttccgtcctcggagggtcctcgagcagtgcctccacgaaggcccgcacgtcgcactccacgacctcgtccgcgtcctccaccccgaaaccgaccgcgaccgtggtgggccagtcgatgtccgcgcgcgtgcgtcccgacaaccgggcccctagggcgagcacgacgtcggcgtcctctaccatgtcgttcgcccagcccctgagacccacgaccccggcgttacgtgggtggtactcgggcaccacgccccggccgcgcatcgtctccacgatcggtgcttccaggacctcgcacaaccgctccacgagctccccacaccgcgcgcggtagcagccccgtcccaccaggatcgccacgcgcttaccctccaggagcccgcggacgcgctccacgtcctcggggtccggctcgacgggctcgattccctcgagctccgcggagaccccgtctgggtcgaaccccggatcgacgtacagcacgggctctgagcgcgctagggtccgtgcggcttcctccgggtcgtccgtcaccgtgagctccacgccgtccgacgccatcgagggtacgagcgactggaacccgcgctcggtgatctcgccggtcgcgcagagcacgggtacgcgatcggccagcgcgcacgccagccccgccagcgcgaccgccaccccgggcccgcaggtcgccagggccgccgccggctcgcccgagacctcggcggccccgatcgccgcgtacacggccgcgtcctcccgcgtcgtccggactagctcgtcctcctccgcgagcctcaggtacggtcgggtcacgtcgtccccgggtaccccgaacacgggacgtaacctgaacgaggtcacccttccacctccctcgacattctcaagtactcctcgatcatatcggggaaggagcacgcgggcatgaaacggagcccgagctcccgggcccaccgctcgataccctcgtcgctcgccaccacggccgcgtccagctccttcgcgagcaggagcacgtccaggtccggcgcgctgtccagcgttccgtggcgcaccgtctgacggtacttccgccggaagcgccgcaccgtctccccgatcacctcccgaatgatccgctccttgggcacgtccgcctcctcgcgtagcatgatctcgtacgcctccagggccgcctcccagatggccttctcagcccgtttcctcccccggtccagccgctcccgcatgtccttcacgtaggccatgaacaaccgcgccgggaccttcacctcgtaccggttcggcgtcttcttcacgatccacgtatcgatcctggacagcagctccgggcacccgttccgctcgaggaaccccttcagctccctgtacaccgtggggtacgggatgtagcagctgatggccagctccatccgcgccctaccgatcaggtccaggagccgcgtcaccgcctcgcagaggtcaccgtccccgagctcgtccaccacaccccggtcggtgaaggccgtggtatcgagcacgaaccgctgtttgtacacggtcagtcaccccgggcgggccggagcaccagaccggcccgcgtgatcctggcctcgaactcgaccagctcgcggcccagacggcaccgggcgaccttgccgtcgcggatcctgcggactcccaggaacctgtactcggggtggatccacgggcgcgtctcctcgcctccgaacgcgtggagtatccgggcgacggcgttcactgggttcgggcgcccggcggggtccggcggtacgacatccacgtagaggaactcccgcgccgtgtacaccgccaggcccgtcagctcgacgccgttcacgcgctccgtggccgtctccagctccaggacgcccacgtcgcactcctccagggcgcgggtcaccgccttctccaggtcccgcttcgtcccggtcggctcgaagtccaggaggccgtacgggtcgcgacggaccaggcgacggcgttccgggcgttccccggtgatctcctccgcctccctcgcgccgtgaggtgtcagcgtgtacacgcaggaggccgtccacgggtcgaacgtgaccgtgagcaccgggcggccgtccacgaagacgcggtcggcccggaccggtccccggatgcgctccacggtcacctcccggtccgcgatcccgaggtccgagccggtcagctcctcgagcacctcccggtactcctccagctccccgcgggaaggttccctcaccggcagggtggtcgtccccgtgaggtcatgcggggttcccgggtttaaggcctcagggccgccgttacgcgtcctaaaacgatgcctcggaccggagctcctcgacgatctcccgcgcgtgggatcggagcgcccggtacagcgcccgcgcgtccctccgtagcgcggcgtccagcacgtcctccgactccgggatcaccacgtcgaggtcgtcgctcgatccgtccgcccggttcaggacggtgacggtcgggagtccgaacctttcgaccagggtcctggcacgctcgaagtcgtgacgggccgcggggctcggggcggtcaccagcaccgcggcgtcggcgcgggagagggccgcgatcacgggacaccccagccccgccggacagtcgatcacgcacggacgctcgggaaccatccggtggatcacgtgcgcgagctcgggtacccagggctcggatctcggatggatcacctcgaggttcaggtccgggttacgcgacctgacgatctcacctaggacctccggctcgaactcgatcgcgtcctcggggcaggcgatcgcgcagatcccgcacccgtcgcaggccgtggggtcctcgacggcgtcccacgggcagacctccgagcacctcccgcactcgacgcaatcgtcggtcttgaccgcgtagcgggcccggatctcctcgagcacctcctcgacctccagctccaggtacgcgggtacgtcgggctcggtcacgtcggcatccaccagcggcacccctagctccgccgccagggcgatcgagagcatcgtcttccccacgccgcccttccctcccaggacggcgaccttgagctccggatccaacgcgatacccccgcctacacgacctcctctaggcagcgctctaccgcctccctgaagacctccgatcggggtgggtcgtctacggtaggggcctcgacgaccggatcccggacctcctcctcgatcctccgcctccaggaatccgagaggtcggacctgttgatcaggatgaccacctcgatcccggcgcggtcggcgacgcgcatcaggcgcctcagatcgtggtaagccgccggggtcggctgcgtcacggcgatcgcggcgtccgcggccttgagaacgtcgtacacgtccttcccggcgccggccggcgtgtcgaggatcaggtccctttcgtcgtccgcaccctccaggagcgcgtgaacgaggtgtcgggaccgccggtcacccacgtcgagcgatcccgacgtcagcgtcgccccggtctcggacacccggtacctccgtacctcaccgatccgaacgcggtcgtacgccagggcgccgttggggcagctctcgatgcacaacccgcagccgtggcacaggtcgggatccaggtcccacgagcgcccgaccacgagggcgcccggcgcgcagacccgcgcgcacgtcccgcagagatcgcacgcgtcttcgtcctcaagcttcggacacgggatgtacacgtcggaccgctcgacctcttcgcagtcgaggtaaagatggaggttgggggtggtgacgtccaggtcgagggcgtcccagcccaggatccggtggacgtgaacggcgaccgtggtcttaccgacacctcctttgccgcccgtgacggccagccacatccggggatcactcctcgggtaactcgccgcgggcggccttcagggccgcctcttccggatcggtcccgggctcggcgacgtaggccttgatcccctgggctttgagaccttgaagcgcgttgggaccgtaacgcgcggcgaccgtggcttcgacgttcagttccgtgaggaccgtgaggatctgcctaccggccccgcgcgggaggttcgcgacggggttactcgtggactcgacgagctcgacgtcgtcatcctgcacctcgtacacgcggatctcaggagctcgggcgaaccgggaggacaccccgtcaccttccaccatcacggccacgcgcaattacctgggaccccctcgtcccggaccaccgcgacctccgcggccgggaccgccgcgacccataccgcgtccgagaccggcgtagcttccccaggtacccggcccggggttcagccggtggatgaacacggctggggctccacagttcggacagctcgagggtttgggggcgccgtacggtacctcgatgatctcgccgcaccgggagcaccggaagaccttcacgtcgcgtcggatcaaacccgatcaccccctcttgggctccatccggagagcacccgtgggacacacccgggcgcacgatccgcaggcgcgacacttggaggcgtctacctcgacgtacccgacggagacgaggagcgcaccggtgggacaggctcgcatgcactcaccgcatccctcgcactcggaggcgtcgtgcacgaacaccgcctgaggtgtctcgacgcgggttattccttctcctccatctctcgcagccgcttctctagttcctcgagcttcttccgcagctcctccagctcttccgtcttccctccttccggaccctccgacacgctctccgcgagcttctctacggcctcggctaagtcctccccgaaggtctcgcgtatcgctttcagtacctccttccgggtctcctcgtccgctgttgcgagccaccaccaaccaccgccccaaccgggaccgccgcgccaacctcctctccaccagccaccgggccacgccggtgccggcgcgccttcttcacccagtacctgccaggcgtgctttatctctcccgtttccgtgtcctcgtagaacgcgtgtggacctagcccgcacctgcacgggccgatgtacctatatcgccggctcgccatgcccttcacccccttaggtcctcctaacgccgcgattagggaaacctaactcggtaataaagctttggggatgggaaagccgtgcccacggtccgggacgcgatgaccgaggacgtcgtggtcgtggggccggacgagcccctggagcgcgtgctccggacgttcgcgtccgagtcgatccacggggtgcccgtcgtcgagggtggccggttgatcgggatcgtgacgtcggtcgacgtcgtccgcgccctggcctcgggcgagtggagggagctgaccgcgggcgatgtcacccggaaggccgtgaccgtggacccagacgaggatctcgagaccgcgctggacctgatggcggccgtcggtgaggaccgcgcggtggtggtcgaggacggggagatcgtcggcgtagtcaccgtactggacgccatccgcgtgctgttaggggagtgagccgttgaaacggttgttctatcccgaggccgtcgccgtggtcggcgcctcccgagacccctcgaaggtaggtcacgggatcttccggaacctgctgcgcgacttcgacggaccggtgtaccccgtgaacccccacgccgacgagctcctgggtcgacgctgctacccgtcgctcctcgagctccccgagcgggtcgacctggcggtgatcgcggtccccgcccgcgtggttcccgaggtggtgcgcgaggccggggaggccggcgtaccgtactgcgtggtgatctccgcgggcttctccgaggcgggcaacgaggacctcgagcgggagctggtcaggaccgcccggaaagtcggcgtccggctggtgggtcccaactgcctcgggatcatcaacgcgaggatcgggctcaacgcgtccttcgcggcggagtcccctcccccgggcaacatcgcgtttgtgacgcagagcggggccctcgcgacatcggtcatcgactggttctcctcgggagacgtcgggacggtcggcgtggggttcagcaagttcgtgagcctgggcaacgcggccgacctggacttccccgacttcctcgagtacctggcggaggacgacgataccgacgtggtcgtgctgtacctggagggcgtcaaggacgggccgcggttcctggacgcgctgtccgagtgtgccgggcgtaagccggtgatcgtgctcaagggcggcaggacggaggccggggccgaggcggtcggcacccacaccggttcactggcgggctcgggagaggtctacgaggggctcgtcgagggagagggtggtatcttcgtgggagggttcgaggaggcgttcgacgcggcgaagctgctggctaaggccggtcccccgacgtcggaccgcgtgctgatcgtgacgaacgccgggggcggcgggatcctggcgacggacgccctgcacgagctgggcttcgagctcccggagcccgcgggggacccctcggtgctgccaccggaggcggcgacgggtaaccccgtcgacgtgctgggggacgcggacgcggagcgttaccgggtcgcgctggaggagttcgcggatcccgatcggtacggggccgtgatggtcatcctcacgccgcagagcgtgacggagcccgtgaagacggcacgggcggtcgtggagttcgtcgaggagttcccgggaccggtgatcggggtctggatgggccgtcactccgtggccctggggatcagggttctagaggagggcggggtgccgacgttcccctcgcccgagcgcgccgcgagggcgctgtaccacgcggccaggtgggcggaagtattataatgttaggcgcacctaacaattgagtaccgacggtgggtggtgccgtgaagacactgctcgaggtgccagaggggaggacggtccgcgtcgtcgacgtggccgccggtaagggagcggccgccatgctgtacgagctcgggatccggcccggggcacgcgtcgaggtcgtgaagtccggtccgggtcccgtcatcgtgcgcgtcggcggcgcgaagtactccctgggtcgcggcctcgcggccaaggtgatcgtcgaggaggaacaggggtgaggcgatgaggacggtagcgctggcgggaccaccgaacgtgggtaagaccaccataatgtcccgggtctgccgcgcgaacctggaggtcgggaactggcccggggtcaccgtcgagaggaagacctgcacgtacgagttccggggggataggtaccgtctcatcgacctcccgggcacgtacagcctcacggctttctccgaggaccagcgcgtcgcccgcgactacctgctcggccggaccgacgggaagccggacgccgtggtcgtcgtcggggacgcgctcaacgtggccggggccgtgcgcgtgttcctcgagatcgcggagctcgggtaccatcacgtcatcctggccgtgaacatgcttgacgaggcggagcgcgcgggcatcggcatcgacctgaaacgactggagcgcgagctgggagtgcccgtcgtcggtatatccgcgaagcggggatacgggatcgagcacctcaagcgcgcgatcgcggacgtcgtgcagggaagggtcgagccgaaccccaggtccccccggtaccctcgcgaggtcgagagggccgtgaaggagctcgccccggaggtcggtgaaaggctcccggagtaccccccgcgttgggccgtcctcaagctcctcgagggggaccccgaactcctccgggaactcgaaaaacgcgatcccgagcttctaaaacgggttaaagaggtcaagaaacgtatcgccgagcggacctcccacgacccggccgtcctgatctcgcaggcccgggacgaactcgccacgcggatcgcccggaactgcgtgacgggtcggccttcgctctcccgtcaggaccggatcgaccgcgtcctcacgcacccggtgtggggcacgctcatcgccctgggcgtgctcgggacggtgttcgcgtcggcgttcctcctgggcgacccgctctccgagctcgtggagggggcgttcgaacacctcgccgggttcgcccgaagtctgcccgcgccatggtccgacctactcgccgagggcgtgatccccggcgtgggaaccgtgctcgccatgtacccgtacgtgttcgtcatgctactactcctcaccgtgctcgaggatgccggctacacggcccgcctcgccgccttagcgtccggcctgctcgcccgcttcggtctccacggcaagaccgtgttccccgccgtcctgtccctctcctgcaacgtacccgcgatcacggcgagccggatcatcgaggacgaacgggcccgcctgctgaccgcgatcgtcgtgccgctgatcccctgcggtgcccgtctcgaggtgatcacgttcctcacggcgaagctaccggacccctggcgcgtaccggccgccgtttccatctacgtcgtcgccctctcgctgttcgtggccacgtcctacatcctacaccgcctcctcttcggcaagccggagccccaccgcgggcacgtgatcgagctcccacgcctccgtaagccgcacctacgcacggtgctcaccgtcacctggctgcgctcgaacgagttcctccagaaggccggcacgatcatcctggcggcctcggtcctgctctgggtcgccacccgatacccggagccgctgggcaccggcgggagcgcgatcgagctcgtcggtaaggccctcgagccggtgacggtggccctcctggggctggactggaagggggccgtggcgctcctcaacgggatcgtcgcgaaggagatcgtcatctccaccctcgccatgctgcacgcgcacctcacgcccgagaacgcctacgtgctcaccctggtgagcgcgctgtacatcccgtgtgccgccacgataggtgcggtctactcggagaccggttccatgaggtacgccgcactctccgtcgcggcgaacctgtccctcgcgaccctggtcggcgcggccgtgcaccacgcgctcgtggcactcggcggctgaacccgccgtcaccttatttttccgtgaacggggtcctgagatccgccaggtaacgccccttatcgcccccggagggagcccggccgatgaggagtggcgccgggatgagggtctcccgatgaccgggggtaacgggagctgaggctcacgaggcggtgtatattcatcgggcggtcggggtgaccccatctcgagggcgggttcaacaccgcgatctcgtcccaatcgacgctggaacctcacttcggcgctccttgctcgacctcggattcacatccaagccgtcaccacggggatcgaccttcacgacggcgagcccgcgcttcggcacacgtcgttcgatcctgaaaccgaattgtttccacgttcacttcgatccgtcggcgtccgtcagggttcgaggtcgggcgccgcggggggagggcggcactgcttaaatagcccattgaccctacctcgccgcgacttagccggcagtcgggcaggccacgctgcaccgtaaaagaggaatgaggaggccgaggaacgccgatcgatgacgagggtcggtgttcccgacctcactccagacgtttcagcaggttcctcagcatcttcgtgtgccgctcctcgtcgtgcgcggtactgatcaggtacgcccgtacgtcctcgctcatctcgtccccgtactcctcgatcacgttcctcctgagctcggcggcctgcgcctcccgctccgccagtcgctcgacctccgccctgatgtcctcgctcagcttcccggcgatccgagccacgatcgcggcgtgcctcagctcctcgtccgcgatcttcctgaacgtctcggcgacctcggacatgcccgcctcctccgccaatcctgccagcgtacggtacacggtcacggcctcgctctcgttcttgaaccatctctcgagatgctcctccagtccgggcatgggtaccacccgggccggtcggcgcgcgcgaggctattatgaacttcgatatcctataacgaggaaagtgataaggtgtgatcggctcgggtcggaccgacggttttcttactgttaaccccctcacgggcccggtccgcggtctcgggtcgaccaccgggggcggcgacgctgccgacgatcttcgccggagaattcgtattcgagggatctcgcccacagatcgggcaaccgacgaccgatgaagaccgttccccttggggaacccgatgaccggaagtcgcggggcggagggggttcgaggcggcgagggggcgttcaccgcctcgtcgcaccggccagcgccagcacgcagagcgccccgaggatcaccagcggcgagaccggcacgtcggccataccgccggtctgctcaccccagcggtgctgctcaccctcgttcgggcacgtggacgaccccgtgaccttcagctcccctaggttcttcaccagcgtctcgtagccgtccttttcgaccttcacccatacgtagtacgtaccctccttacccggcgcggtgagtttggccgtcacgttaccctcggagtccgaggtgaccttagcgtagtgtccccgttcccagttctcgggcggcgtgtccttgtgctcctcaccggctatcctgacgatcaccgaggcgtcggacacgggctcgcccgtcgacgcgtcgacgaccttaaacttgacctccatctcctggcacgcgttgacctcggcggggtactgaacgtccttcacgtccaacgtgcccgccgccgcggcgggcgataggaccgccagcagacccagaacggcagccagaacaactctcaagcccggttccccgtactaagctgttcgaacatgggtaattaaggatagtggagctttccgtcacacccgcggtgtcaccggttcccgaccgtgagacggcgcgggctcaccggaccgtaagtcagaactcgatcgatgcgatcgggatacggtggatcgggccgatgcggagtggccctgcggggaggtcccgatgacctccgggtaacgggccgaggcccgctgaaaggtgacgcggatggggaggccgaggggtgccgagcggtgatgaaggtggcacaggccgacggcgatccctttggacccggaaccagctcgccgaacgatgatctgacccctctctcggaacggtagtgggtggctcggggacgcctgcccctcatcaccctgtcagtgcccgaagggctcctcaccggtgttcccgttcggagggtcggagcggcaccggtcatcaccgttcagtggcctaaaggatcgtcatccccacccatcggaggccggtggtttaagagcgtgatgcggccgttcccggctccacggggcgccaccgtatcgcggatgtgtcgatcgccggacgcgacgtggcgtccagcttaggacgtcgtcgggtcagggccttcagcagcttctcgggcggttcagcgcccaccaggacgtgacgagccgggtggtgcggtcggtggggatcggaagacgcaacgggtttcccctgttctccggagagtggataggtggccctctccgcgggccgggggtatccgagtcgtaatttgatgtttctggatatcaataccgtgttgtggtggcgccggtcgccgtctcattatcgttcgacgacgtgcaggccgcgggccgcgtcggtgtctcgaagggaagacaccgggggacacgtgagtcccttccggtggaaactcggcggacccacggcttaaggggtctccaaccgtcggaggggagcgctccgtacggccctcccggtcccaggtgagggacccccgtgcggcgaggacggattcccctcgggcctcgaggtacgagggacccggcccgacatccgccgtgagatggtacgcacgtgttcggggcggatgccgtgggtccgatcccgaggtggcgggtgaggcggctcggggagaacccgggtgacgcacgagctgcgcggggaggtcgggggtcggcgggtacccacacggttccccgggtcctgaatacggttgctttacccgggtaggtcgaaggaaggaggaccgtccggaagcagaagaagcaggaacagtgtcaggggttccaaccgtccaaccccgaccgtctacccgcgacgagatcacgataccgtccgaccgggtccgggccggcacgcggaccgacccgtcatctcccggtggctcagcggcgcctcctcaggaagtcgaacagcctgtgcaggtcgtcttcgggcgttttcagatcttccaggcatccctcgagcttctgcgctatctcgacgacgggatcgatctcctccggtctggcgcgaccgatgatctcgcgctcgtgctcgcggagccactccttgaagctcccgtccttgtccctgtggtagaccggtagtcgatctcgcaacgtcagggtcgcgaggtaggaggctaacccgataccgtccgcgggcaggtcgtgctccacgccctccttccagtcctccatccaaccctcctcgaccgccacgacgaagggcaccgtccccgtggcgtgctccgggttcaggtgctccgagtcgaccgccgccaggacgggtcgctccgtctcggtcagcacgtgatcggctacctcggacggtccggcgtcctcagggggaggagagtggtcgactgtggtggcgaggacgccgcaggcggagtcgaagacgtccctccggacggcggcgacaccgtagcgggtgcagtgcacgtacacgtacctactgtcggtctggaccaccacgcactcgtggtcgacctccacgtctggagccgtccgcatcggccggtgctccacgggggtccggtacaccgcggagaacgacagtacggtcctcttgggcccgtacgcgatcgggacctcctcgaggaggtacgtcaggatcgcggcggcccagctggcgtccgggggtctgaccgtcgacggcacgaccggcaggcccacgtccctcaggtcctcgacggccgggctcaggaggcttcccagctccatgggtctactgtccctctcgacgtcgaacgggtcaagatcatggccgagtgctatcaagtactcgagggccgcggcctccgacgggtggaggtggtcgaccctaccgtcgccgtccacgtccttcaggaactgggtcctggggacgtacacgggcgccaacggttccgctcggagggggaactcggggtccccgcgcggggagctcatgagctccttcaaccgtatcgaccccccgtccatgtgtaaggatgagcgtgcggacaggtgcgggcccggcgccccggcgggatcacgggcggcaccgggaccgggaacctgcaacccctcaccgcgctcccgtccgtggtcaccgccgcgctccacggtgaacgtcgccgaggtcctcgcctcgccgtacggaccctcgtgctcaacccgtggacggctttccgggggcggtcggggggaggagagaaaaagggaagttcactcgagcttgtgggcgagtcgtcgtaggccgtatcgtccgaggtagtggaacccgagtccgagtgccgccagggtagcgaccgcgaaggccagtgccgtgaggcacacgagaccctccaccacggacaagggaaccctcactccctccccaccctcacgcaggagcatcgcgccgggggttcacggctgaggatggaatgggtggatgtatcgacatattaatgtttcgaaaacggatcgctggttctgatcagatgacgctccccgcgcgggttcgaccctgtcgacgacggtgcgacgctcacggtccgtcgggcccgcgccgtggggttggtatgagcgttcacgtacggtatgtcaatgaccgtatgataaaaatcgtactgtttactcaccacatacgtacggtaattccactacagtaatacaaccgtctaggttttgaaagggccgtgaaattgctaaagtttgggtacaaacacttgagatattcttacccacgctagtgccgatcttaaccctgaacgatggtattactatcgtccgctgatagtatgtaattcatgtgtgaatcatactatatcgacatgagcgttagtcgacgatagtacgtgaacactcttactagcgtcaccggccgtgccgcagcttccagcgctggagttccaactccacgtcgggtacctcgtacctcccgtcgaggaatctcctgcgcgaacggatgattccaagtacgaggagtagtgggcgggccatcctccgagggtcctgatcacgaaggattccaatcggtcggggagttcctctaacacgtcccggattccgggagatcccgcgggtctggcgtcaaaggccagcgcgagcccgcgggcgagtactcgtcggaccttcttgtacgggaggtccgagacctcggtcaggagggtcttgagcaccgagcggaggttgcgcatgaggtgtcgcgcgagctcgaggacctctccccgatccagtgagaccaaccactcgacgaaggaaacactctcgttctcggacttacccaggtagagagtccgcccgtgcttgaaccgggagtcgcgacgccaacgggccacgtagtacgggccgcaggtgctcccgttgacggtccgataagtaacctccagactcggcttcctcccccggcggtagacctccctcaggactcggagtgtccggatccgctcgaccggatcatggggtatcgggatatgagcgtgcgatccgaccaaccccggcacgtgatcccccgatgtgcctccaaattgtatggagacaagggtagagtggtaccccaggatataatctttgtcatcacgataggggaccacggctcaccggtcgagtcgcacagccgatgagctccttccatacaagatgggccgacctcacgacgctcgggggcccgaaaaccgcaacgtctttaaaaatacgtctttaagtaaagcgacccatccggcgcggacccgacgcgtccggagggggtcgtgacgaccgtgcgaattcccatcctgctcgtcgtctccctcaccgtcgcggcgatcggcgcgcaggcgctggatctctacccgtacgaggtcatcagaatagggacggacgccatcggtccgcccgtcctccacgcgacccgggacggcctgagcgtgtactacccgacgaagggtgggacgtgggtcggggtgtccctcgaccgggacctccgcgtacgcggcgtggcgctcgacgcggtcccggtccgcgaacgcgacctaccgaccggcaggggatcgtactaccgggcgctcgaggtgaacggtgaggtgctggtcgtcgacgacctcggcgacgtcgtgtaccgggacgcgggccgctcaccgaacgtcacgaggccgaggtggaagccgctcacctgcgtcgcctacgtcggtcgggacgggaggatccgggccgtgacgatcggctccggcggcgaggtcaccgccttcgacctgaacgtccgcggcgaggatcccgtcgccctgatcgacgacgagacggcgctcgcgtgctacaggtccggcggcgacgtctacctggccgtcctggggaccgagtggtcggtcctggagaggggccccgagtgcgtcctgctgcaccgggagggagaccggtgggtcgaggtcctccgctggtaccttcccgagcgccgccactacgaccacctgatcgaggcgccccacgagcggctcgtcgtcggacgggtcgtcgagctcctgggtcgcgaggtctggacgttcccgctaccgctgagccccctgatcgaccggtccacgggccggatcctggggtggagggtcgggagcgtgccggtgctcgagtccgacggcgagatcgaggtcgtcacgggcgacgggaggaccaccgtgggcgagggcgagctcctgagcgccgtggacctcgggtggggacacctcctggtcctgaggacccccgacggtcggatcgagttcgagctcgtggagttccggctctacggtccgccggaggtgagggacctgaagcccgaggtcatccggctcggcgaccgcacgctctacctggccacggccggggtcgaaccggtgacgacgatcctggtgttcgacccgggaacgcgccgcctctacacgctctacggtaaggactaccgcgtcgagggagacgagctggaggtgacggacccgtggggccggacgctccgctacgtctacgacccggagctgggcccggtaccacccgtcctggtgcgcgacgggacggtcctggtgtggaacgggggcgggttcgaggaggtcctcacgacctcggggccggaggacgtactgccgctggacgacaccgggatcctgctgatctcgcgcaccggatcgtacctggtggatctcgggcgggatcgtcccgaggtcctgcccgtcgacgccgtgtggaacgactacggctcgtgcagccactgcggggtcatcgtcgcggtccgcgagggcgacgcggtgcgggtgatcaccccgctcgggaccttcgagctcccggacgcccgggaggccctctggctgaacgaccgcctcgtcgtctacgaggggaaggacggcgccctccacgtcgtcacccacgacggtcgccgcgccctcggcgaggccgaggacgcggaggtggtggcgcgcgtcggaccgttcgtcgtgctcagggagagagggacgtacgagctcctcgccaggctgacggacggcctgtgcgtcggactcccgctcccggaggtccgcggtcacgagatcgtgtaccgcgtcggcgaccgtgagtgcccgatcgacctggaggacctgctcccggagcgccaggtgccggaccgctggtacgtcgtcgaggacctcgcgctgggcgacctaccggacgcctggtgccgaccggccggggacgggacgtgccgcgtcctgagggacggggacgagatcgtcgtggaactgtccacggggttcgggcccgtgagggtgcggacgggactcaccggcgatcccgtgatcgccgggctgaaccgctcgctcctcacggtcgtgtaccgggcgcccgacgggaccgcacacgccgccctgctctccccgacgccgatcgtcgggaggtacaccgacaagggactggaggtcgtgagactggggcccgacggtccggagcgcgtcgacctcctaccgcccgccgagagggagaccctgacgtcgctcctcgtggtctcgacggtgcccgagtacgcgtgcgccacgcgcgtgaaggtcggggaccggacgtactacctgctctcggggtccctgtacgacgccgagggacgcgccttggatcaccggcccgggtcgacgccggggtgcgcgggcgagaccgtggtcgtacccgcgccgatcttctcttccctccgtaggtactaccccgtcgcgacggtgccggcgctcctggtggggtcccgggaacccccgtccggcgaccgcatcgagctggacggcgtcaccgtgctggtccaccgggagggcgacgttaccgtcctcacgttcgtccgcgacggacgctccgtggacctggtgctaccacccctcccacggggtgactggcgcgtcgagcgcgtctcggggagggcgctgaggctgtcgactcccgacgggttcgagctggagctcgtgaccgacccgtggccgacgccgaccgtcagggtcaggaccggcccgacccggctcgaggtcgagagatgggacggggacggctaccgacccgcgctgacgctccgggtctcaccgcccgaggtcaacgtggccctcctgtcgaactgcgacgtggccgcggtcgtcggccggctggtgttcctgagcgggaaggtctggagggacgtcggtaccctccgatcggtggcggtgtggtcctccgacgactcgaccgtcctcctcgaacgggtcgcggcgttcgaccgcttcacgcgcgagcgcgtgctggcgacactacccggacggttcgtccgcgtcgtcccgacggagctcgggtgcgacggggagccggtgacgctgatcgtgaccgaggggaccgtggtcgccctgaccgggtcgtcgagggtcctggagcccgagtacctgagacggctggacgggggctggttcctggccgtgttcgacatcgacggggagtatctggtggtgctgtcggacgggaagaaggtggtggaccggcgcctctacgactcggtcgagccgaggccggacggcacgctggtggcgcggacgcccgcgggtgaggaggtcgtgctgagggtcgagcggacgggggacgggtggacgctgaccgaggggagaccggacgagcggaagggcggtgggaggacccgacggatccccgtaccggtaccgccggtgcccgtccgacggcgacgatcggcctagaactcgatcaaccgccgctgccccgaccgtccccttaccgactcgcccagcacgttcagtagcgagtccattcgacgcagttccttcaggtagtccttcgagcacagtttgtaggaccacagcagaattttaccttgacagagtcagaaattattgatgagtcagtcagtagatcttctacccgtctacttgagtgatcgtcgtccttctgagtggtgagggggtcctgctcctcggacgtctccggcttcggggttcggacctggggtctcgagggagaagacacgcccctgtacgcgcgcttccaacagccctgagaggccccggtggcggggaagtgggagggacatcacctggacgccgttcctacccttagtacccgtccgaccggggcgccggaggtgacggttcacgccgctgctgatcgtcctcccgctggtgctcgcggtgactgaccgggagcgtgtccggtgactacgaactgctgcacaaacggcgcgaacgggtgcaacgcctacgcgtggagcgtcacgagccggctcataccgatccgcgccgtctcggaggtgcggggctcgccgtgaggccctcgatcctgccggtgacgaccgtgtgaggatcaccctcggccgtcgaaccgtcgctccggcgtctggcagattaggaaaccgaaatcgagtggagagaaacaggcatgtttgacgtctaagtccgcggcgcgtccgcgaggggaccacacccgggagcactcgacgtgagatgtcgttaacgtggggtaagagtttatccgaaagcgggtcctcccgccgcccgcgacgtcgctcgggggagttcagttgcgtgtgatgctcgacaccaacgtggtcctccgggccgtcgaggagctcctctcaccctcgatcccagaggtgaccaggccggtcctcatctcggagggcggaaggggcgttcgtaggcgactcatcgggctgaaaccctcctcgagggagcaacgtgtggaatccctttacacgttcacgttctccctgctcggatgcctcgacgtgaccttggtggtgggtcccaggctcatgaaggagtacgagaagaacctggcaggggagtccttcttcaaccgctgttggaacctccgaggtgttcttcaactgctcgaagagaagtgcaagtgggtggacccggacgaagagctcgtggagttgtgtcgtaaggctcatcccaaggacgatcccgcggacgccgagcacgcggccgtctgcctacaaactaaagcggtgttggtcaccctagacgtgagtcatttttcacagatggcggaggagctgaggagagagggtttagcactgaaatggcggacgccgttcgacttcctccaggagctcggcgtgttcaaatgtagaggttaaggttaggggtaacgtcgggcatggtctgaggttcgggctccacccaccagagcatctccggacaaccctcgcgcaggtaccactctaaccccgctctcaactcccggtacaggtgcctcagaccctcgcactcaggtaggtaaccaccgtactcctcgtagaagttccggtaactcgagcgtcgatcgtacacgcggtcggatcgggtgaggaactcgtggagtacgcccgcgtgtacgttcgcaccgaccaccgccgcgaaccccagcggctcgtactcgagcagggccaccggcgccttgacgtccatcacgaggggtaccacgagctccgagcattccctcagcctctcgaggccggcggtcgtcatgttcgcgctcgtgatcgccatcacgttgtccgtgtaacagacctcgaaatggacgcctttcttctcgaacttctcccgaccgacgacccgcacctcgaacccggcctcgacccaggactcgatcacctcctcgctcgggtgaaccctaccctcgtactccacctcttgcacgagcaggcgccgacactccgcccggatctcctccggatccacgcccagctcctccatcacctcctcgaactcatccagcccgtacgaggtgatgaagagtaccgaggcgtccgggtccgtgaacaccttccgcagggtctcgagaccggccttcccgcacgctcctccgaccttcacgggcacgccgggcagtctgagcacctcgaaacaggcctccaagagctccctctcacccgctaacacctcgagctcgaaccgcctgaacaggtccttggcttcccccaacaccagctccacagagttcttaccctcggggaaccccttacctgaggccggatagcgcttcacgagcctgaggacggcgagcgtggtgacgtccaacgcgagaccgtaaagcgaggatttatccaaatgaacagcccccgttacttggggggagggggaggtcctttactatacaagtttctactccgatctggtaagtggtcgttgtacccggaaacgtgcggtcctctccccacggttgtcctcggagcgaaatccttcctcgctttcccttgaacttgttaattgcactgtgtgcaccgtgagcgtggggttctaccggtaccacgccgtgatattcgaagagagaaggcccggagctggcgagggaagctttgtggagtaatccatggggcaggatcttcctgttagaaactcgagcggatccgcctgtccagggtcgagctcgaccggggttcggttactcggaggactaccggccgatcggccccgtccgggtgagcccggaggaggtgatcgaacggtacgggagctggcccgaattcatccgtcggtacgcgaatggactaatcggcttgggaatcgtctctgacctcggtcggaagaggaagacagtacgtcattcggcgcttcccgaggctgcgagtcgcatgggggcctcggggagaggcgggggaggcttcagatggcccggtgatggttcttcgaagtatagctacaacccgaactttactccctatttagtttaaatttgatttttcatccattttaactcgccatcttttcgctcgatccaactattctcaacggcaaaattgataatttcttgtagttccttctcatttactttgcgcttatctaatgccttctttttaatctcattttctggaacacagccagcttttcgtatttctgataatatccatttcatgtctgtaagtatcccagggatatgtgcacttacgtctatagctaaacttacaatacttctatcaaatttttctacgacttctatagctttatctacatcattcttagaataccataactcgcccttttcaatgttatcagaatacttatcataatacgcatcttccattttctctagtatattacaatattttttgataaatttacttatttcatcagccaactcacttaatctacaattattagaatattcttcatcgcataatttctcagctatcccatctatatctttaagcgtcttctttaaatgatcaagtatgtcaattacattatgactcttatatacacaccttcttacctttttagcatcatttggattcagtattacgtagtaaccttcttttccttttttccatattccgataagccacattaaacgctctgcaatgtacttcgccatcagctctagtgattggttaagtaatgccactaaaatcgtatttatatcaccttgtttaatattctcatcggtcttaataaacgcttccactaagatcttagtctctatatcattttgacttaccttaacatctttgtggataccaatctctttatggatgtaatccctgcactccttgttttcccgatagcactttaccgcagctagtaaccatttcgccctccagtatatcggttccgcaggctccctaaacacgatcacgtacttccccacgggctgaggtaccgctcccgcaacgtttagaagagttactaaataaacattgtggagcgaggtgttttttctcggctgcgctggggatccaacgactggcgcacaactccccgtacagtcaccaccggggtgtgaagtgctcgggggacgggggcgtgctccttcgtcccgcggattcgtgggcgggcgtgctggtggatacggggagcacgatcgtcgccgtggacgcgggccccaacccgtggcacgcggaggacaccgactacctccttctcacccacgcccacctcgatcacgtggcctccctggacaggtactcgaggaacggtgcgaaagtactgtgcccgggtgacgtgcgcgacgacttggggctcgtggacagcgcggtgggcgtgaagaaggtgaagtcgatgctctacgacgtgatcgtccaccccatccccgtagaacacacgtgcagcgcgtacgcctacgtcctggacttggaggagtgtaacgtcctggtcacgggtgattggcacgtgggaccgcgcacgatcgatggtgagatcaaacccctctggaaggccgtgcgtgaggtcgtcgggggcgagggggtcgacgtgatcgtctcggaggccacgcgggccctcgtggacgctcccgagctgggcgggaacgagagggttttcgagtacgccctgtccctacacgacccgcgggacgtcctcgccttcctccaacccacggacctcgagatcatcgacacggccttccgagtggcctcggacctgggactcgacgtcgtcgtggactcggaaaccgatcggaagctcaagttcttggagaggcgtggggacgtggagtgggagtacgacgtggccgacgagcccctggtgcgctccctgtacctgaccgtgagctgggagaaggcgagggagttggccgaggcggggctcgtggaggccgtcgtgggtaactgggcgacggtccaccatctgaggcgtcgagtcggagtgaagtacgcgtacgtgatccccaggtccgggcacgcgtcccgacccgagataacccgactgatcaccgagctggaaccctcgtgcctcgtgttcagacaccggtccggggacgccacccgcctcgaacggtactactccaggttcgtggacgaggtgagggtgtgggtggggagagggtgcagggacgagtccctcgagctcccgccctgactcatccgcccagcaacctccgcctctgcttcacctccctcatcttcttcaggacgagggcggcgtacttcagctccgggtaacgctcgtcgagttctccctcgtcctcgacctcctcgagcctgtactccctgagcctggccagggcccgggcgatgggttcgaacagctcctcgtgctcgaaggccacctctagggcggtcctcatgtcgagttcgtctccctcgcgcgtgagcgcggtgagtaccgcgtggagcgcgtccacctggttgttcacgcggcccggtttcctggactcgaagtcgtccaggatggcgacggtccccctgtccctggtcgacgataccctgactagcttgcccttggcgtcgggtcgcctccggtactcgtacttgttcagcgggaagtccgtggcgtgggcgagcatgagcacgtcctcgtagtcgggagcctcgctgggctccttcgggtacccccagaagaaccggtacaggaagtagaacctacccgcctcgtcgaggtcctcgaagccgggggtctcgccgatcgtctcctcgaactggtcggcgatggcctcgggcacggcccggtaagcctcctccatgacctcctcgggcgagacctcgacctcctcgtcgcccctcgacctgaggaccttatcgtaccgcgtgtacgggcgtagggcggcgccgcgggccacgaccaggcgctcggcgtcggagaacacgaggtcggcggccctcctgaacgcctcccgaacgttccggcggacctcgtccctcacgcgacgccacgtggtcacctcgctccccgagcgcgggcggcacgcgatgatctgggtcgtgcccacggccgccttccaacgctggtggagcgagtgttcagactccgttctcactggccatacttccgtgatctcgaaccccgcgtcccgcagggctcggaccagcgaggtccaggcctccgtggccttgtgcgtgaacattagggttaatcgtccgtgctcggggaggacttccctgcaggcttcgaggaattctcgaagtcctcgctcgtactcccgctcggggtcgtcgtgccgggttctgttggcgacgatctcctcgtccttgggcgtcagctcgttcgaaaacgcgcgttggaactccatggcactctccggcgaggatctcgatatggtgacgaggaacgtcgggtgtccgaacaggcgtttcaaccatacgtagaagaagtcggcgagttccgcgtactgaacgttgtcgtagtaaggtgggtcgacgacgatcgcgtcgacgctttccacgcctaggttccttaggtgctgaggtagggctctagcgtctcctaggatcacctcaacatctccatcaacgcctgacagtgcttgagagatctgtctgaacgctttgagtacattcggtgcggcccagtaccagccaccgtcctccgcgagcacgttcatctcgccgtagtcccaagcccacgagtacgcgtgctggtcgaagatgcctttgacaactccgcgagtgtactcccatcgcgagcagatcgtgttgtagttgatcatcttgtcgaaggctatcatcgcgtagacggtgagcggctcgcggtactcgtcgtctaaacccccgctcaactcccggatcacgcggagtaactccgcgtgcacgagcaactgtctctcgttgaacagcttgtagaagctgtcgatcccgcgaagcctgggctccctagtcttctcaccctccggaatttcctcggtcgggatgaggtcctcggcgaccagctcgtcccaccgctcgaacaactcctcccgcgcccgctcgaagaactccagatcccgatcggtggcggcgcggtactccttccccctacccgagccctccacgatcgcggccaggtaggcgcggacgaacccgtgctcgtcctcgaagtgcctgcgggaaagccggtgcacttgttcccgttggatcgtcgttccgcaccgcgggcaggtcaccgcccctcgactaacggtaccccggcccgggtcgaacccatcttcccgagcttcggagtacctaactacgtcgaacccgacttcgttaccctcaccctcttcgggcacgtccggtaagatgaccagcgactcctccggcttaccccgcttcctcaacaaccaccagttcgggcgggtaggtaccttcaacccgcacctcgggcactcgatccacttgatccaaacgtaggcgcgatcgttatcaccgtagaactcgcccacgcgctgctcgagctctttgcggatctccgcgaagaacccgcgcatcttctcgaggagttcgcccccgtactcgaccgggtactcgagcgtggccttgagcacgagccacgcgaccgggttcagctcgcctgcgaccacccgacaaccgagcctcaacgcctcgaacgggatcgacccaccacccgccatcggatccacgaccaacggtctctcggaacccgtggcctctcggtacatacgtcgaagggtcacgccgtgaccctcatctcgagcatcacccggaatgaactgtcgcagatccgcgcccttgctcgacgtgtcggcgtgggaacccgtcacgggagtgtacttccaggaggcctgatcctccccaacgtgaaggatctctaggagttcatcctcatcggcatcaactgggaccaaggtggtgagcacggcagccctggacgctgacagcggccgcctcgcccaccacacgtgaatgtactgcagtggtggtctacccgtgatcggcatctccctagccacctcgtccgtaacgtccctggcggggaaccgttcgtcgatcttcctgtcccgagtgggcacgcgccctcccctccgactccctttttacgtagcgtccaatccacaacttacctcggggttaagtcttgagcggcggggacctcccctcggtcttcgacgtcttcgagccgacggagcacgcgatcaacaggaacaagaacgtcctgagcgtggaactatcacacgtggaacgggagggtacccccgagtccgaccccgagaagttcctggcgctgaccgtcccgaccgaggggctagtgaacaccgtcgtgagcgcgttgaaacgcgtggccggactggaaggaggcgagcccgtccagtacatgacggaacgctacggcggcggcaaaacccacgtcctcgtcaccctctaccacctggcgacgagcgagagggctagggaactcctcctggagagggcccgaggttacgtggacgagcggcgactggaggagttggaggaagtcctgtcggccctcgaggggaaggacgtgcgggtcgtcgtgttggacggcgattccgtgagcgagcccaggtggtgggtggaactggccgaacgggtcgacccggagctcgcggaggagtggcgttctcgggacatgaccccctcgaagggcgacgtcgaggagctcctggatcgcgcgctggacggggtggacggcgttctcctgttgttggacgaggtgactggaatgttgatccggtcgggcgaggagatggaccgtggtctcgagttcttgaagatcctggcgagggtggtgggtaaggcggacgctcccgtggcgatggtggtctcggcgccgaagggtagtggcgaggtacagcggcagttggaacggttgaaggaggagggcgaggtcgagtccgaggcggtgttgcgcgaggaggtgcacgacgtcggggaggaggcggtcgagcagctggaccgcgtgggagaggagaggatccccgtgagcgacgtggaagaggccgcggagatcgccaaggtatggctcctacgcccgagggaggacgtcgacgtggaggaggcgcgggaagcggtcgtcgaggcgtacgaggagttgacctccgagctcgcgggcacggaaggcatcccgcgagacgaagcggcgaacgcggtgaggcggttgcgcgagacgtacccgttccaccccaggctcttggaagtcctgaggagcgtcacgagggaggagccctaccagctgacgcgtagctacctggagatcctcatgcaggtcgtcgggtacgcgttcgataggtggaaggagggcgagtgggaggctccggtgttcgacctcggggacgtgttcctggacgagacggaggtcgaggaggccgtggtgaagcccgagggttgggaggagccggcgggcgacctcagggagaagctggacgacctggtggagaaggagggcgagttggcgcgccgcctcgcgtacgccctgttcgtgcgcagtctcgtcccggactccaggaagagaggtgcgacgccgaaggacctcctgttggacgtggccaggcccggggagggcgtggaactgtccgacgtggagagggcgctcgaacccatggaggacacgctcttctacctgcacagggagggggagcggtactacttcgacaggaccatgaacgtctcttccgtgatccagtcctacatgccgagggaggagcgggtcggttggaaccgggccagggaggaactggagagggagctgaggagtatcgggggcctgggacgggacgcgctggtcctgtgggaggacgaggaggaactgttgaacaagcttcgagaacccaagccacgcgtcgtcgtactaccaccgtgggagggtgaggagcgggccgaggagctctgggagaaggccgagatggagaacgccccagtcttcctggtcttccaggacaaagggcgcgagaggcggctcctgaacgccgccctgaggttatcggccgtcgagagggcgctgaggtccgacgacaagctcgcccgggagcacgggaaggagctcaggaggaaggaggaggagtaccggaacagggtgcggaagctcctccgcgagggttacacgatcctgcggtacccttccgagggcgggttggcgagggagatgttcagtgtcgaggaggggaggagtctggggagtgctctcggggagaagttggaggagatcgggttcctcgagccgggtgaagaacccggggatgttcgtgtcggaggggttggtggagaagcgcgtggagatgatgcctaaggaggtcctgaagaacgcgtactccaagcccgggtgcccgtggtgtcgggaagaggacgtgatcgcgatgatcgtcaaggggtgcgaggagggcttcttcgtggtggacacgggtaaggcacggttcttcctgaggcgaccgaagggcgtggactccaaggcgaggttcgggcatccgacggtactgcaccctccggtgggatggacggcggacttcatgggggctgacgagaccgtcaaggacttcctggacgacgtgatgaaaaggttggaggaaccgaggaacacgaactggagcgaggaggagaggtggctctcggacgacgaactgctcgagttggtgagagaggacctccctcaggggttggatagggccgggttggtgctccggcatcaggacgagggagggatcgtcgggcccggggatctggaggaggacaaggatctcctggaggccgtcctggaggagccgaacgcttgggtcttcgaggagttgaaggtgacgaggctggtgtcggacgaggtgcgtcgggagggtagtatcgcgaggagggaactggtccggcggttgtcgcagaggttcgggctggaggagagtcgggtgaacggtgccatcagccggttggtgcaagacggtgagttggaggaggacggtgggatcgtgagcgtgccgtccgaggcggaggtgactgtggacgacgtcgtgggcgttgtggagaagaagggtgaggccacgctggacgtgctcgcgagcaggctcggggttaacccggcgttcgtggagcccgcggtcgtggagggtgtgaaacgcggtcgcctggtcgtgtaccgcggtgatcgaccgttacgggacctggagtcggtgagtgagggtgtgcgggtcggactgccggaggagcgggtcgaggtcgggtacgcgggagatccggtggatttcgcgagggaggtcgcggacgcggtgttgatcgtgggagggcgtgctcgggtgcagctcgaactggagagtgtgaagggcctggactacgtcgataccgagtacctggccaggtttgaggaggtccgggtgaggatcgaggtggagggtggcgtgctggaaggtgagaagaagggggtcagtccgcggaacgacgggtggtggatcgcggtcaggctggccgcgggccaagcgagcggcgcggaactccacctcaccggccgattcgaccgggactcactgaccgacttcgaagaatccgtcagagagctcgcggatgccctggaccctgaagaagcgcatgccgtagtggagaaggtcgattgagacggtgagcgaggactacgggtcggaactaccatcctcttcgtcaccatctctacttatcctgaagcttacggattccctgaccgattaatccaagtgctagaccttctagttaaccactctcaagcctttattcataagtataagtatatgaactatctctgtcattttgattcaagtcagaacaagcggtaatagagttatcttccccacattcacttcagttttctcacctaagttcaacatcttcatgtaggtgatcaatatctccttaactgttacaacttcgccatttagggttaacataaagcttctttcgtacctacttagccaacattatttcttagaaataggcagaatatggaaggttcaaaatataacagtttcataccattaatctttatatatgacacatatgatactcttagatggggtgaatatccatgttcattctcgaatttggggttgaatatagcttaggatcaccgactattcgatatgtatgcagagtctactactcaccaacattcagcatccaacctacattccaattcgcgacagagtactttagtaatacttcgttactgcaccttttactgactatagaaactatctcaaaacttagcagtatcgaaagtaaactataccacatcgaaagtaaactaagcttccggaatactttactacagaatgtaatctcgaactggctttcaccgatactgccaccaattcccgaagtgatcaagatactactaggtagttggtgatcacacggtgtcaaacttccatccactaccgtcttttatgagtccagggacgtagtcccacccggactagtttttcactcacttccctctttctcctcacctcacggtccgatatctcaggtgctagcggtagggagtggagaaattgaacatcagcttccggcccatgttgggcagttccggctgtaagatttccgtccgattagtacgtagaacacgttcgaatacgttccacttaggatagacacaacgccctcaatggatgggtggagtttggcatcaaggtaactacgccgcccgtcccacccccggagtccgacgggagggccgagaccctcgaggagggtaactggtcgtacgagacgcgcacgtactacgtccgcctccgggacgaccgactgggaaccgaggtggggaagggctccgccgagtacgccgtgcacgcgctcacccacgccctcagggtcaccgagggttacccgcccgcccacgtccggcacgccgtcgacgaggaatcgatcttcctctacgagctaccggcggctgtcctcccccacctggactgggagtccgcggtccgggaggccgagcgcacgcgcctggagcccgagcggctccggctcccgacctgtccgtggccgaggggctcaccgagggtctcccgacccctcgtccgccgctaccttcggcggttgctagacctcctaaagcgactctccctgcacgtgcatggcgcggttaccgaaccctcaaagcactaacagccaacacaacagacctaagctattgctaaaccaccaaactatcccactaagttgcgcccgtgtgataattcatcagatttgacaacctaaaggaaattctcgaaatttctagcaaccctaccgaaagttgctaatatatctccctcctttagtaggaagagggctgagaatgctcgaggaacgcgagcttgaggagcttgctaaagctctgaaacggggagaactggacaaaaccggcgccgtgctcggcttgctctatctagcgtacgttgagacaggcggacatggaggcatgacagctgacgatgtagtacgagttttacaggaatcaggatacgacataactaaagagagattctactcgctcgcctcccagttgatgaagaaaggctacatagaatctcacaaaatcaatggacgtagggttatctacacgatcaacagcgacagtgagtacgaggtggaacagaaactacgcgagagactcgagaaatccgccccgacggctgagcgtgtaagcgcagaggagatgcggagaatactggataggcactcgacttgagggaaagcgcggccccgtgtgggacggtggtttaattttctcggccctcatggtaccaattaggagaagttgttggggattgtcttgttttggctaaggtcagtaaggtgttcgtggtcgggttcacggccaggaagggaggtaccgggaagacgacctgctcgttcaacgtagggttcgagttcgccaggaggaggaagtggaagggtgtgaagagccatccggtgttcttcgtggacgtcgatccgcaggcgatcggtaaggagtcggagcgggcggccactacgcttaccgacctcttcaggatcgggcctttcgacctaacacccctcaaactagagggcgacaggatggtcgaggccagacgcgtcacgaaggagaccgtcgagaggaccggtggtttcgagttgttccacgtgaaatactcgccggatcccgaggagttcgacaatgcagatcctatgtgctcggttcacgataaggtgttcctagctcacctcagcacgcacatctcggagtcgccgggtatgatggatttcgggaagttcctgaacgccatcacgggggccgggttcgacggtatcgtcgtcctcgacacccctccgctgaacgtcaggacgaccttcgtcctcaacgcgctggaacactgtgatttagtggttccagtcctgaacccggagtcctacgatcagatccccgacttcatcaggcgacaccctgtgcggttcatcgtgctcaaccagatgctgaagggtaggacgaaggaggcggagaagatccgcagggagatcgagggttacctcaagaggacgacgttggacgaggacgacgtcatctggatccctagcaacgaccagctccgctcgtgcacgaacaccggggttccggctaggtgtaggaaccccaagccccaggccgtcacgcccaagttccatcacatagcctggaggattgaagtggagcgggagcggcggagcaagatcagcgagatcaggctctgagcgggggagcgccggtgttcgagctggccgtcaaggccttcggtctcccggattcgaccgtgacccacgccaagcgcggcctccagatcatggacgaccgggcttcgaggggccggaagccggtcacgaggggcgactacggtaaggtgacgaggggggtcgccaggctcgtcaggcacgcccacacgacgctggtggtaccgggtctcgacgtcgtcacgaagtgggctaagcgctacgggaaaaggccctggaagatcgtccgtaacgtcctcgaggacggtggcgggctcctcgacgagacccccctgaggttcgaggacctgccgccgggcgccgccccgatcgcggccgtggtcaggacggggaacgcccggaaggtcgtcgaggaggcgttcctgacggaatacccgctgttcgcggcgatgatgtgcgcggtgctcgaggacgcggctcggacaatgctcgagcggttctcggaggaggaggtcgagacttacggggagttctgtcggaagcacccggggaggcacggttccagcttcctgatcggggtagccctctggggctggctcgaggagaggacgggggagactatcgacgtcgacgagaccctcaggagcatcgagaaactcgccagggacccggtggaggaggccgtgaacgggatcctagacgtcggctgatacccgccgaggcagtgactagaggatctctcggagagtttaacggactgggggcggtgccggtggatgctgagcactgggaagtcccgattgtgccgaaacccgagttccgggaggcactgcaacggtacatgatctcccgactcgaggaggtcggcgttggccccaaaaccgtcgaacaaattgtaaaccttaatatcgagaaggtggagccatggaatgacatcaaatcaaagataacttatgaaatccaatataatttgaagcattgctgttgcatggtagaggacttaaaaaaagatttgaaacgtatctacggagagttgaggcttgaggacctctgctcgttcggtgacgctgccctgtggttactcggcgtccgtagagcggtggtcgagttcatccacgacctccttctcgagcgaccggacctcactaaggctgttgacctctggttggtcggaaggatgctcgatgcgggcgaactcaaggcggctacggagctcctggaactgaacgggtacgaggttcctccgtccccaactcgagtaccagagctaaaaactaccgaaagagtccataggctgggtcacgtaatgactgaaacgatactcacggcccacgcgctctcgaacagggtcgatagcagctccttcgacgaagccgttggaaaggtcaggaactggttcaaggaggcccagtcatcgctgaggaatgaagttcagaaggaggatagctcggagctagtggtgaaatttatcgaagggttgcgcgacacgctggaggatcttatcagaaagacgttagagcacggtaaacccgagcttgaggaggtcaactctactttcgagctgttgggtatcgacgatctaggttcgtttttcagccgggcgtgtggtgagttcaaacgggcggtggattacctcgtcgaggtggtcgagttcgaccccggacgaatggcgaagaacttactccgagcgagtccggagatagaactcggggatcggacgctggaaccggaagtgtacgatccgaggtggagcatcttcgagcgagacctgagcgagctcgacaggattacgaaggagatgatcgaagagctggtcaccgagaccgatcggtcttcctccgagcgcgaagcccccccgacccactgtccgaggtcgtggactccgtcgtcaaggaggcgcttgacaaacgccgagggaactcttgaacccagtcctaccccctatcgctcgatgactcctaggatctctcccagcgatcctgtcggaaaaaggtccccgctagaaccgcgcccgaactccccgacggccgcgcatgccttagtgggtacccttgatactgttctcgttccgacgactttacgcccgggatcgcgaccgagcgccacgtctcacggggcggtgggcgttgagggtactcccggccgacgagctggaggagtggctgtcggaacgactggaaagcttcgtgggcgaggtcggcgagtactcgatcgtgctcgcgtgcgcgttctccaggcgcgtggggagcgggttgcccgcgagcgacctcgtgacggccatccgggagctagaccccggcccgtgccgggtcatgctgctgtggggcgccggtaccaccgaggtggcggacccgctggaggccgtgcgggccgcggaggacctgcgcggttgcggcgatgaggcctggatcggcgtgcacccgacgcgacccttccacggtaagttcctccgcgtgctcccggagggtgagggcccggagctctcgatcgccttcagctggaacctctcgcggacggcggcggacgcgggttcactcgagagcgtgctcgagcgaagggaggagcgcggtgaaacgttcgaagagttcgtgggcaggctacgcgaggacggctggctcgtgggccggttacgccgtgagggtgggaagtcccgcgtcgtcctcgaggacgtgcggaagttcaggttcccctgctcgggcccccgggaggtgcgggtgcgtggacgggtgggcgtgctctcgggaacggtgagcgtcacggagctggtcctggacgacgggtcgcgggaggtgacgttggtcctggatagggggctccgcgagtccttcgaggacgtcgagtcggtggtgacggaggtcgtagagggggagttccggcgggtcgtgcaggacggggaactggagagcgacgtggtgcggtacgggatcgtccgcgcggtgcgggacgtcgtggaggaactcgtcgagcggggtgaggcggagtacgaggtcgccgtgcgggcggaggagacggtgaacggcgacgaggcgggtgtgctcgcggacgagtggaggttcccgaacgcgaaggcggccctacgctcgctcgtccgggagatcctccggacacggttgcgcgaggtgttggaggagttagttgaaagttaatttaggacagatgttatctcatcaggaggttccgtgtcgccagggggcgttccagtgcccgagcgcgtcccattgagcccgaccgaagagttctatgacagggtgaaatcgtacgtggaacgccgaatgtcggacctcggcttagaacctccggaggataatgagagtcttctctacgatgagaagtatggtcatttctggacgttcaacggatttggtcgagaattgtggagtgatttaagtgcagtatggatattaatcgtattaccttcgaatggtcttctttcagaaaacatattcgaacttgaggaacaaccgtcgacgggtaaggtattaagggacgaagtagaaagagttggaaggggattgctagagcgggagtctaagcgtcattttagtgattactttttgggagaactagaagtcttcaaggaagcctcacagcatgtcaaacgcttcgtactagatgagccgaactttgaggttgcggttaacctctggatcgccggagctgctcttgcgtctcaagatggtaccccaagaatcgccatccaggctatcagttcgatagacaccgaagtttctgagtttccagttggggttccttcgtaccctcttggttatatcctccaaggttgtggcataacggcttccgtactctgcctgactgctcacgcgatggttaaccgtggagtagaagaagatcagttacttgaatatctaagtgatacgccctatggtgagaaagttcggattatatgcgcatcatgggttgagggaacgtacaaagaggtgattaaagaatgcctagaaggtttgaaagatggacttaatagattactgaggaaaggacgaggtttaaacatgagggatctagggatagacgaccctgaggagttcgctcatgaagttttgagaaaacttgctgatgtaatagctaacatctccgccgtcttcgaaactgttcacagagaacctgagaggatcgttcatacccttctctcggtcgatgaagagatacgactcggagataagatcatcccacctgaggaatatgatccaaatggaacaaatatgtatcggttggagaagaccttcgagagtatcgatgctgagaaatttgtagaagatgctatgaaaacagtcggtaagctcgtaggcgggtcaaagggtgaagatgtagccgaaaccgcgaccaaactggcgacagaagcggtaaaacaggggttgaacataatatccgagtcgggtggggatcgtaaggggaggagcacactaggggagctcatcgaatccgtcgttaaggaggtcatgggtgacgaccggaagagaaagtaagtggtcattctttgccttctcaatgattaagtgtcctcgtaccgttctctaccgatcgccgatactccgaaatccctactctaccgtcaggaaagccctccgaacggacgttccatcgactaaaaggagtatctcaactgtgtgaagcactgtaaggttggttaagttaatttagagcggacgttgtctcaccaggaggttccgtaccgtcagggggcgttccagtgcctgagtgcgtcccgctgagcccgaccgataggttctacgacaaggtgaaatcctacgtgagacaccggatgtcggacctcggcttaaggattggagatgccgctctttacgatacaaagtacggtcccctttcaccacttcccattttcatggatggatggtggcgtggatcatggattcgagagcgtagattatgggatggaaagctggacaagccatggctattaaccgtgtcagtcctagccgaacttttcgattctaatcctgaagaaattgctggcattccctcaattgaaattgaaccaggagcatcaaaattgggatatatgctaaggaaaatgataaagactggagaggagtcgttaaaagagaaacgggagtatggacacctaagcgactatattctgtgggcactggaagtaattgaggtgatcactcgaagaatcagggatctcgtactggacaagccaagccttgagaccgccctgaacttttgggtcattggagctgttcttagctctcgaaacgtttcaaaagttactgtcattagcgattcagtggatcttgaaataccgaagtcttctgtcgagattccgttaccttatggcattaacattcaaggtagtagctcaataacttccacgctctatgtaattgctcacgcgatggtacatcgtgggatagatgaagaccagctgttagaacactttaatatacaaacagtgtgcgcgttatggatcgaggagaatatgcataaaaagatgattaagaaaggactagaggaattaaaacacggttttgaaaagttactaaagaagtcgaagtgggagctggaactcgaagacttagggatcgatgaccccgaagcgttcttccacgaagtctcgaaaaaactcgccgagattgtgaccaacgtttcaaccgcttttgaaactattcaagataagcccgaagagatcgcccggaacctgctctcggtcgacgaggagatccgactcggggacgaggtcatcccgcccgaagagtacgatcccaagtggagacaatcacaacgcgtgaaacaacacgtaaaaggcactctggaaagcatcgacaccgagaaactcgcggaagatgcgttgaagacggtaggaaggctcgtaggcgggtcgaagggcgaggagatggccgagaccgcggccaagctggcgacggaggtagtaaaacgagggttggacatggtgtccgagtcaagtgggaatcgtaaggagaggagtgtgctaggggaactcatcgaggcggtcgtcaaggaggtcatggacggcgctcggaagaggaagtaggtgaagtcgcccttacattcctcgataatccctatatcaccgcaactcccgaccgttgggtccggcggattatctggcgctcagcgtccagcaacaacagcactgccctcggcgtcgtagggtgaggaggctccgcacgtttccgcagacccgactggaatcgttaatatttctgtaacgattctgagttgagctgctggagaacccctccgaacccgtgatattccacactaagatagcgagctcatactactaatggttttcgggaaccaccgaccgccgaaaccccggggatcccgactttaccccggagaaagccgatcggacgggcgcttcgtagggtaggaaaccctaaagtttccgtaataactcaaccggtatcgtcacgacgccaccggaccgcgcgccgtccgatcggtacggggatcgccggcagaacgtgtcgcgacccacgccccgacgacccctcggactccccggtctccccgcgtgtcccctcgacctcggaaccactcgacccgcccgcggggaactcctccagcgtccactccccgaaaccggggtactcccgacgcaccggcttcagcaggtgacggacaccgtcccggtcctcgacgatcagcccctccgacgtcgggtcaccgagcggtactcccgggactcccgcacggaacgcccgtcggagaggaccacgacgaacccgtcgtcgaaccggaagacggccacgaaccaaccgtccgacaggtcccggcggtacaccggctcccccgatcgctcggacgggaggacgtacgcgcggccggtccccgggtcgaggacgaccgaccccgcgacgagcagctccttaccgccgacctcccagcggcgcaccgggacctcctcgacgacgggacggacgaacggtccgccctccggccggaccgccgcgcagcggacatcaccccccggggtccggtagaacacgagcccctcgaggaacgccagcggctcgcccggtcccaggtccacggtctccaccgggacgaccaccgtcggggcgacgcggaccccgcccgggaccgccacgcggacgtgaccgtccgggtcccggaacgcgaccgccatcaccctctcgcagcccacgaggccgagggagccggggatcgcgcgggagccgctcagccgggccgccggggcgaccgaggcgtggaggccctcccaccacccggtgaagaccaggacgtcgccgtcttcctcgaccgtcccgatcagctcgcggggctcgaggccggcggagtgggaccagccgacgacggccccggtgcccgcgtcgaccacgggggcgaggggcagcgggaacacccagacggtccgggaccccagctccaccgggacgccgcacacgacccgctcctccggcgcgcgccccttcaggaggtccagcaggtccgcgtcggtgaggcgctcgggcgtgtaccagcgcaggacctcggcccaccggtcgccctcgcggtggagtaggacgcactccgacccgcgcacccggacggaccactccgtgcccatgacggccaggtggacgtcgccgcccgaccggtacgcgaccagcacggtcccctcccggacgagcacgaacgggtcctcgccccgcaggtggagctccagcggtacactcgcctcctcgccgaggaggacggcccgaagccgcccgtcccgcacgtacgcgacgaccgcgccggagtcggagcgggagaccgtcgggaccgtcgggtgggcgccccggtcctcgaggacccgtctattcaggtagtccacggcgatcacgcggccgtcgcgctcgagggccaggtaggcgatccccctcaggtccgggggagccgcgtcgaacaccacctcgcgcgcccggagcgagccgtccaggcggacccggacccacccgccgtccgacgggtacgtgacggtgggaccgcgttcgaacgggtagtcccaggagatcaccggcggccccaccgcgtccgtcccgacctccaccacctccaccgggtacaggtcaagggcccgggcacccgggagcgcgaggaggaccgcgagcgccagcagggcggggagcatccggcgtcccccggtcttccctacgggattagtgaggggaacccacgttccgggaacccgagatatcccttaccgtttcggagagcccgtcgccgtacccgccacgcccggagcacggtccggttaaagttaagtccgggcgatcggacgccgcccggccgatgaggaggaggtcccattgggtgagtcgccgatgaccggcacggctgaggccgaggccggcaccaccgcggaccggccccagcggttatgactgccgacgtgctgaggtagcactaccccatatcgactttttactcggttaattaactcgatagaaaggatgctccctcccgggagaagactgtcgttccggagggtttgagtacgaggtattaccgagtttactcgtacttatcaatactccgtaggcctcaggtgaagctcataacggcggtgttccgccgggcggtccggacatcgagcaccgcggtagctttccccgtgtgcgggcttcggagcaccgaacccaggtcaccgtgtggcggggtgaaatctgtagtcctgaagtagcgttccatcctcgctcccatacacttgtgaggtacttagaggaaccgtgagccggggttggtcgagtcgcattctcacatcccgataccctcggatctcgtggaacgaatccgagtcctccgggcactccgggaggtctaccgccgggggaagaagccgagcctcgagatcacgtaccggacggtgaacggtagcatctgcggccctactacgtggcccactggcggaattcccggcacgagcgtgggcgcacgctctacctaggtaagtccgagaacgagagcgtttccttcatcgagtatctggtttccttaaatcgagcagaggttctggagctcgcgcgacacctcatgcgcaacctccgctcggtgctcaagagcttactcccccaggtctcgagcctcccatacaagaaggcccgacgggtactagcccgcgggctcgcgctagcattcgacgcgagacccgccgagtcaccgcgaatccgggatctactcgaagaactacccgacaggttggaatccttcttcatgagaaccctaggaggctggcccgcgtactacttctcgcacctgaggaaggtgatacgttctaggagggggtcactggatgagaagcacgagatcccggacgtgaaactggaacggtggaagttcagacggtgaaaggtaccccgggaactcgctgccgtgagaatcctcacgcggtaccgcgccgtcggagggtccgacgccggatcggcggtatcacggtcaggcatgggaagccctgataccggctctcaaggcccacggtgagctcccgttcggccacgaagaaaggtcccaggaacctgtaagtgacggtgaccgtgtcggcgccctccgccgggatcacttcgtagacaccggagggatcgcccctacgcacgtcctcgaccccgggtccgggaaggacgacctcccgggcgctcgagtaggggaactccgaagtcacgaaaacgcgacctccctcgtatcgagctttcgcacccaccgggagctcgactaagtacagggttcgatggttcgccaggacgaaaggcccgacccagtccacaccgttccagtcctcgaccttctcggccagcgggaacacggtcggggcctcaccttcgtcggggatctccctgtaccccagggccagcgcgcaccgtcgcccgtccgaggagtaggccgcgatccactccatcaccatgtacttgtgatcggtcgaccggcagcgcaggacgtcccaatgtcgtcggaaccgcaacgcgatctcgatcgagccgtcgggtctcagtcgaccgagtgcggtccggctcagatcggtcgagtcgaggacgacgtaccctccggccgtcgggacggcgacgtacggtggcgggtactcggagaacctgaccgtccagtcctcgggcggcctgactcggacgactcgaccgtcggactcccgcacggccacggcccagcctggcgcggagacgaggtagtaccgaccctccgaggaggcgatgcagcgtccgaggttcacccgccacccgggttcgctcaccgaactccgcgagcacctcccgggcgcccgtctccagatctagcctcacgagccggtactcccgcgtcccgccctcctcaaagggctcgcccggctccacgtacaccaggtagggcttcccgtcgatcacctcgggtagcaccggcttcacgtcgtcggcgtcgttcggcgtggtgatcgtcagggtacggcaccccacgaagcgcgggtcccgggacgccccggagatctccgacaccaggacgcccggcgtctcgtcaccgcccggtagtaccagacggggatggtaggtgatcacgaggagtctgtctcggtcggggtcgtagaacgccccgatcgggtacatccgcgggtccgaccgcgattccgagggtcctccgctcacgggcaggacgcgggggctcgtgaccaggtcgtaacgcaccactcggtagctcatgctccaggtcggttcgtccgagtcgagggtccggtagtcggaccgcacgacgacgatcatcccgtcgtcaaccgcccccgtgtccacccaacaccggaaccagggccgtggtcgcgtcctcccactccgggaacctgtagacctccttcaggatcaccggtaatttgaggggcattccggtcgccgggatggggagtaccagcgccgtcaggaggacggctggtagagccggcgcttccacctcacctaccacgcgggatattcccctgaacggcttggttcgggggtcccggatggtatcgtggggaacctatagggcgtgttgggtgtggacccggcgcctcggtgggattaccggcggtatcaggaccggggatcctcgcttaccgccctcaccgccgctctgccggttccgattgccttgattccggttctggttaccccgctgttccggacctcgttgaccatgttgaccaccctgctcgccctgttcgtgctcctccggctgaccgccctgccgctggttctgctctccgccctgctggccctgctgattgccttgctgctgaccaccctggccctgattgctctggttttgaccactctgacccgaactgccttgattgccaccttgattcggaccaccctgcctttgaccttgttctcgatttccttttccttctagattcccttgctgttcaccctgctcacctcgtccgctgacgccaccccgtgtagttccaccgggatgtgtctctcgaatcctcccgtccttaccgatgaccaccgacgtgccgtccgggaacgtgaactccacggtctcgtcggtctccctactcttcagcccctcgacgacgccaccctcggtcgccagcaccgcgcgcacgcggcccgatgtgtcccggtaggtgatcagcgtaccccggtagtccaggtaccccttgaagtccggaagtgtgcgaacccactcgacccggcccgaggtgtccagccggaccacctcgccgccggtcagcaggacgactgccccgccgtcggtccgttcccggtgaacctcgcagtccaatccgaggatccgtcccgactcatcgtaccggacggccatgaactccccttcccgcttgaacaccgccaaaccggtggcttccagggcgggtctcaggtattcgcgctccgccagtatcgcgacgtgtagggtcccgaaccgatccctgtagacgataacccccttgtcggcgtggatcgggaccccaccgaggtcgtaagtccggatcacccacccctcgttcttcaggaccgtcaccgcggtgccgtcgtcgaacacgaacgccgtattctcgtcgagggtggttacggtatacttcggggacttcacgtcgcccgaaaccgagtccaccgagatcacccgaacgagtcccgaagtgtcccggtacgataggagcaccttcctcggatccgccggggaccaggagtagtccaggtacttctcgaagtccgggatcttcgaggcccagatcaccctgccgtcgcggtcgaagcccaggaggacgccgtccctcagcaccgagatcacaccaccttccgcgcccacacggacaacctctcctcgaggtggcgcgatcctgttcccgaccaccgtcacgacgacaccgtcggcggtcctgtagacgaccagatcccccgactcccccaacttggacgcgtacgtgacgcccgagggtcgcacgacggccacgttcgtcgaacctcctcgcgtccggtacagtagtatgaccccgttgcccgtggcccggtggccgagtagccggccgaactcgctcagccggtaggcgtcggccttcaagttttcatccaagtggacgatgatgacagtgccattattgaggacgatcacacggtgaacgccgagttagtccgacaactccgttcgatacaccacccggagctcccggaccgcgtcccggtccgggtcgacctcgagggcgacgacatcaccgtgctcccgatcgaacgccaagagtgaagtaccgtcctgacacggtgctaagacgaggaccacccgatcaccgtacaacgggattgtccgggtgttgtctccagtgatggtgccgggctcggtcggcggtcggaccccgatcctctcgacgtcaggtgatccctcaccggccgggacgcggaccgcgtacccggtggtttcggacctccagacgtccacctcgaaaccgtcgtccaccttcgggtacacgtcgatgacgtaccctccgacggtatacgagtaccgggtgtacgggacggttagttccctctcgaccgtcacgccgtcgagctccaggaccagcttgacgtcgagcgatccgtacgggtcctccggtacgctcaccctgacgagctcggcgtcagatctcagcttcgcgacctgttgaccgttcaccaccagctccctgctgtactcgaacttctcctcgtacacgccaccgtcgtatggtatcctcaggaccccgtcgtcgacgcggctcgacacgtacagggtcgcttctccggtaccgtgatcgaacccgacctggtacaccacggggtcctcggcgaagcccacgggaatcctccactcgtagcgcttgaccacgcgacccgtgggtgaagtgaactcgaaggatacctcgtgggtcctcgccggtattacgagagaaacccggtgggctccctccttcaatcgctgcggttgtgcgctaagagctccgccgtcgatcgatatggggaggggttggccgtcacatgtgaccttcagggtaccctcagtcggcacgtagataccgacctcgaccgcgccctcgagcgagccgttctccaccctcaggtcggcccccaacactccgaccgagagatctccgacgaacttctcataccgggtgacctggtagcggataccctggccgtccctacccgcgagcgttacttccaccgaggcccgcgacacgtcgtcatcaaggagaacgtccacggtgatcgagtcgttctcgggtatcgggctgtcgagcgttcgctctcccacgatgttcccggacttgtcccttactatcacatccaccctgtccagggtgaacgatccatccggaggcgtgaaacgtacggttactgccagttccttcgtgccgccggactcgactgtcttggtaacctcaacatcgtctacggtcaggacgcgtggcgtcagcggtaggatcacgggggcagtctcgtagcccacggtgccgcccagatgctcgaagtatcccaccgagaccctgacgtcgaagcccgtccttaagatcgcggcgggacccctggcggtgaaatcgacgctgcaggggaccagtagtccacctgggaactcggtggatccttcaccgaggacaacttccgcgccgctccagtccctggtgacggctacccagtgcaccgtgttaggactacccggaggcgtcaggtgatcgacggtcacggtgccgcggacgattgcctcgtccccgttctgtcgccactcggtctgtgatatccggcactcgaaactcagtggtaggacgtccacctccctgacgccataaccgtgaactgcgaggtgttgccgaggttgtcggtcagttccgtgctccccatcacgcgtagggtgatgatcgcgggtaggtgctcgcggatgtcgccactcgggtgcgagagggtgatctcgctcgaatcccatgacagcgccgatttcaacgagttcaacagctcattctccagatccccctccgaaggcgtgacgttcaatgccgtgccgtcccgatccaggaacgccagatcgacaccttccagcgacacggaggtacctttctcgaccccgatgtgtagcttcagcttcatggtgccgtcatcggagaactccacatcgctcgcgcggaacgacgcgacgttcagtaggtgttcgtccggtgacacctcgtagtacaggtccggcccctgaaccagcaggtaatcgccggtgaccgtcctgatcgtgagggccagcatccagaccatactgagcgaggctaggccggagaggtcgacgtcggggttcccgtccccgtctaggtcgagccgctccgaccccggacgctcgaccaccaacagcgcgttcggctcgtccgcaccccgaagcaggaacggcacgggacccgaggtcgtcgggacccagatcaccgtccgctcgcccttggccggccacgagtcctcgtccaggtagtacggcacgcggtcgggaccaccgtaacacggtatcaagtagtacgtgctcgtcccgtcggtcaccctgagggatagtccggcgggcgtcagcggtgtaccgcgccggttggtggcgttcaacaggtcgtcgggactcgacacgggcccgttcgcctcggcgtagtccacggaggtcacgtcgaacccctgggccgtaagcctgccgacgatatcgtgggcgaacgggctgtcgaagtaggaggtgcagttgttcgcggtgagctcgaacccgagggccacgctggtcggcttgcccacccacaggtagtctttccagttcgagggcagctgcgatcccatcgtgttcgggtcgtagaaccagacagtggtgagtccggacccgtggtcccgaagcgcgtactcctcccccgacaccgggaccgtgaggacgacgaccaaagacgccaacgacaccaacgtcgggatcgcccgacgggccgccggtaccaccgccggaaccccgattcccccgttcgctctccggtatatcaacgtatcgcatgagttcacggtaactccagcttcccgccccgcctcccgatccacgcctcgacccggacgtccagacccgctcccgcgagccgtttcctcagcgcccggacgccgtcgggcgacccgtgccgcagcacgaggtactccggctccagctcctcaaccaaccgcacgagctcggccgcgctcgcgtgcccggtccccgatacgatgtaagggtaagggaccgcgtccaggagccttctcagcctcccctcccggtcccggtagaggaaccagcgctccgtgatcaggacgtggggcctcttcgacaacccttccacggtcccgacgctcgaggtgacgagcgggtactcggggcggctcacgacctccaggtccgccccctcgtgcgcgcccgccttgacggcctcgtcgaccggatcgccctcgagcacgtgcaggatctcgacctcggaggcgacgtcgatcagcgggttcacgtgggtgagcagcagcaccgtccggtcctcccggtggagttccaggagccgctggatccggtactccgccgcctccgggtcgtccgggtggacgctcgcggcccgggtgcactcggtcacgatcgcgtccacctcgtcgtccaccagctcccagagcggggggtgctcgccgagcgcgcaccagtcccccgtgatcagcacgcgcgcgtcgcccgacaggaggaccgcgtgggccttcgggcacatgtggttgaccgggtaggtccgcacgtccagcaggccggcctcgaaggaggaccggagcggctcggcctcgtcctccatcccgaggagcgccgcggtcacctcgtcggctcggagctcaccgaactccgtcctcgggacgccgccgtagtggtcgcggtgagggtgcgtgacgatcaccgcgtccgcgcgcttgacgtacggtcccttccgatccgtcacgtccacgaagacgcgggtgtccccgtagtcgacgaccacaccgcaccacgggtcgaggggtctgaggagcaacggacgccccggaagcgtccagttctccggaggatgaatcgtttcgcccggaaatcgtcacggtagtcgagagagaaaggggataccgagagggcgcgtcgggacgttcctgtgtgtaccacggagatgccctcgagcggtcagaacttggcgagcgggtgctcgacctcgtctttcttctcgatcagttcgtcgatggtcggctcacccttcatggcgcactcgatagctttcttcatggcctccttgttgttctcgtagagccgacgatcgtcctcggcctccgggtgcacgaaggtgttcgctattatgaccacgtcgtcgacgatgtcgcgggggattatcccctcctccacggactcgacgaccgcctccgcgatcccccgctgcacaggaccgaagatcttctccccctgggccatgttctcgatggtgaccgtgggtgtgatcagtgtgggcggtcggacggcgactccgggcgtcaggacggcgaggagcggcgtgtgtcccttggagggactcgcgagggcctcggcgaacgctcgaccgaccggaccttccacggaccccatgaccaggtcgatgtgtgctatctcgggttcatccggctcgcctacgaaggcctccccgacgcgtaacgcgaacggcatagggatcgccctcgtacttcagctcgtccatagtataagtgcaccttaacttcagcgagaatcaaaagggctaaagaaataccgatcgccgcgccgagcgagttgagttaccggctcggtccacgtcccccaccctaccgaccgatctaggccgttcatccgatcgggacgacctccgggggcagccacaggcgccgggccagcctcgacgcgcgcagggtcgtcaggacccgtccgacggagacgagcgccagcgagaggacgccgaccgcctcgccgtacaggacgtcccagccgagccccacgaacagcgccaccaccagcccggccaacccccgccagtgtcaggggcctcgtgacgtcggatcccgtcgtgtgtacggcgacggggaaccggaggggctcccgacggtacgcccggacgagcaggagcgagggcgggacgagggccgcggccccggcgaccacgaacgggccggccaggaagtgcccgaagaggaccggcaagggcgcgaacaggcaccagaaaccggtgaggacggcgaaaccctgcagctgcaggaggaccagcccgcgcagccaggggaccgatccccaccggtaggcgcggcgcgcgatcagccagtacacgaccgacatgacggccagcgggaccagggcgaccgcgacgacgaacgcgaccagggtccagaaggtcaccttcacaccgagcttcatgagcgccttgatcatcttgagcaacagcttcttcgaggccttggccagcgccgtcccaccagtcttcccgcccgcgtcgcccttcgcgccggccttgaccttggccccggccgcgcccttcttccccttcccaccaccaaatagtatggagagtgaacccagcacgaccgacaggcccaccttccgcgggctgacgtcctccgggtcccgaccgctctccttcagcagcctcagccagtactccaggagctcccggaccacccgacgggcccgttcgggcggacccacccgcacctccaaccacggccagcgcagccagaccccgtcctcacgacgctcgaagaggggaggcttccgctccttcctcaggaccctccgcaggtgtctgagcagccggtccacgtccccgtcccgggcggccaggatcgccttgacaccgcggtacagcttccggctgcggaacgggagcacgacgtgctccaggtcccgggtgatcaggaccagccgcacctcctcgtccgggtccatccgcgggcgggacgagcggtgctccttcacgctcacgacgtcctccggacgtacccggaccgtcccgtccggcccgcgcacgacgatgcactccgaggagagcctcacccacgtggaggaacccgggagcgcgcggactggccggaccgtcgcgaccaccccagcgggtcgggggatcggcctcgacccgcgacgccggacgacacgacgggcgcgacgagggcggtagaacgtcgatcccggaagcgcgttcccaagaccggggagtccgagatcgagacccgcctcctgtcggaagccgtcgaagttatctttccagaaggcttttaacggatcaccgggctagccacccgccccggacggcgctctccccggcctcacggtccgcggacggaccggatggggaccgagcgcggcgacgacgcccggagtctagttacttaaaagttaacatccggaccgtttggaaacggtgacgaaccggtgatgcactcgacatcccctcgtccgacggtccggaccccccgggagacgtggggggagtgggccgtgttcccaccctgtcggataatgcacgtcgtcctctggtcggcgttgtggtcgctgctatgggtggtgatcctcctggcggtgtaccggaggtcgggacgcccatccaatcggtggatctcgaccatcgccggccgtaggtggttccaggatctccgctcgagggtgaaggaggtcctggaggccgtcgaaaccgcggaggagctcgtggataccacctttgagggaaagggcgccccgcccgagctggaccggaggctggcggacgtcctgagggtcccggaccgggaggtcgactggcggaccgggctcgggatcgagtacctggggaagtccgcgggcgatcggttcgcgctggagctcgcgctggaactgacgggctcggaggaggcggtccgggagctcgtcgaggacgggtacgacgtcctgccgttcgacgtgcgcctcgagggaccgacggggaccgtatcggccaggggcgtggtcgtcccgctcggccggtccgacgggacgccggtggtcgccgtcgtgggggtgggtcgccgcggtaccgggcggatcgagcccgtcgactcggagctgttcgtcttcggcggtctggtgagctcacggcggacgttctcgagcgttctgaggaccttcggcgagctcctcccgaggggccacgcggaccgacgcggcgcccgtcactgtccacgcccgcccggtgggggggggggcgcacgggaacccggataatgacagtgtcgtcgcgccgatgatccggatccaccgtactatcggggaccgcggaccacctcggaccgtcctctcgacgctcctcgggggttcctcactcgacaaccgcccgtcggccagctcgacgacctccgagcctcgagacgtgccgcgtgcccttcgacgtgaaccaggaccccggacacggcccggtggtcgacaccatcaggatcagtaagggcaccggcatcgaggtccccccacgggaggacaattcccggcgaccacgtgaacgccgaggaacccggcgaattcgcacccggataccggatatctgcccgaggtcacggccgttcgagtctccccggttgggagtcagcccccggacggtaccgcggtgatggtgttgacgtcaccccgatgaacgaccccagcccggccgtggtgtctaagtcactaccctctgactccgtcggtgcgtccgtaccccgtgcttcccgtcgagggcgagccgtgtccgacgcgagtagctccggctctccgtcgccgttcccgagggtcaccgtaatggtctcgagacaccggccgccccgtcacggactcgatagtttcatcgtctcagggaccgttcgagcttcgacgacgctagtacggtgcgacgtgtggtacttccggattaagttggcccgtaatttcggaactcgcgacgtttttcccgcacggtcggagcgtcgtgacggcgacagacgtcgaatgcggggacaggtcgccgatgggctacggagggagaaccatccaggtaaacttattctaaccctccgaaggcgtggtaacgggagggatggatggcggacctcccggcggaaggtccggaggtaccccgacgcgagcaggaccgaggagggcagcggcgggccgaccggcaccgcgtcggtcagaaggtagttgaggaggctccttaggtgcaccgccggcctgccggaggtctccacgggtagttcggatcgattatcccttcaaagcgaagtagggcgcgaggaaccggcacgaggggtactacgagccacgcgccggaccgtccccgcgggtgcgtccctcgacggtctccgtcaggagctctatcaggggcagggtcagcccctcgagatgtgcccggcacagctccacgagcctccggtggacctccctgcggtccgagaccgggtccccgtgctgcagcttgttcctgatgcgacggatcggcggcttctccagcgcgagctcggtcgggtcgtcggtcccggagagctccgcgagctcgcggagcctcgggtcgtcccggaacgcgtccccgaggcgctcctcgaggtcccgcttgaggggtagtcccccgcccaccagggacctcaggagctccccgctccggctccagctctcccacacggtctcggtcgactcccccacgtcctcgccgagctccccgaggatgcgacgtatggcgccccgagcggccgggagccccccgaacgggtcgaagagcttgaagtacagctcgtccagggtcgcggcggccagctccttcagccgccttaactccccgtccgagcgcttcaggcgcgcccgcttgtaagcgccctcgttcaggaacggctcgacgagcttcgcgaaggcccgcagcagcaggtgcgtctcgttcatcaggctcgcggcctccgccactctaccccggtccagcatgtatcggcagtaatcccgcaggaagtcccgcacctcggacagccgagccgccagctcgcggcgctcctccggcgtcagcggtccctccgagaccgtccggcgggcgggctcacgaggttccacgtcccccaagaacacccgccggagcgtcccccagacgagttccaccagggaatcccggtcggggacgtcctcctcgcgcacgaactcgtggaccggaccgggggacgacgcccgctccacccgggcgaactcccggagcgtctcgacccactccacgggctccgagcgtatcgtccggagcgcctcctcggcctcgtcgacccacctgggggacgggtccgccaggtacgtcgccaccgtgtcgcggatcctccaggccagcacgtggtcggtcacgtccgccacgagccaccggtccccctccacgacgccctcgacctccttccccgagatgcagtacgagaacgccacacgctcccagaggctcccctcgtcgtccccgagcaccgcccggcggaaggtcagcgcccggagggcgggtaccaggcccagggccgaggcgaacggcatcacgcgggcgccgtgcgtcaggtcgaagaggaccgcgtcgcccgtcctcaggagttccagcgtcacctcgcacactcggtcgaccaggccttccggttcggtcaaccgcgcgtccgtgtgctcttcgaccccgtactcgaggtcctcgagcggctctcggaccttctcttcgtacttctcgcgcttctcatcctcctcgatgatccccgtggacacgaccacggcctcgccgggctcgacgtcgaacccgtcgtgcagggcctcgaggagcgcgagggtacccagctctcggtccgaggtctccacgacctcgaccttccgaccctccacggtccactccagggtgtcctcgggcgattcgccggtcagccgctcgagcagcgacacctcgaccagccagggttccttcggtttccggtagttcgacacgtccccgagggtcaggaggacgtgcaaccgcaccgggcgcggccccggtcagacgattcacggaacgttaaaccgccgtcggacctctccgggaaacctgagagtattggaaggattctgaaacgtttccgcgccgtggaccgaactcgaggaaacgttatgaccggtcggacggtccctaccccggatcgggggagcgcgcttggtactgccgctcgtaacggcgatcctcctgactgcagcgcccgcggcggggctgcagttcgaggccccgacggcgggctaccccgtgcccgagccgccgcacctggaggacggtgatggtcacgtcgagcccccgttcaggtacgcgggcgaccaccgagtgagggtgtacccgtgttcggtaccgtcgaccgcctgggtgttcctggaggaccgtcggtgcgtgatcgccgtgaagcccgtcggcgggggtcacccggtgctgctcctcgacgtgagcgacctggtggtctcggtgggtgccgacggcgtccggctccgcgggggttacgccaccgcggtgcggatggagcccgtggacttcccatccctctggataccctacgaggtcgtgacggggtccggggtggagctgctgttcccgtggctcctcggcccgatcgtccgggagtgctccaggaccgagttcgagcgggttgcggaactgatcgccggggagcgtgggacccctccggaggacgtcgagaccggggtctgggacgagctcaggccgccgtcacccctgccggtgcccgccgtactcttcgtgccgcccgcgaggaagcgtcggtccgcgaggtgatttcgcgtccactctgcgccgaccccgtgcggtgtcgaccgattcgggttcggtctcacaccggttctcgtaaggcctgtgcctgaagtgcttcaatggatgttcttgtgtttcggcaactcgttcaatcaaggtctcgagggtggacggtaaggacgccggtataggaggtagggtgcattggatattaaggaagtgaacctcgtgttggagctctccgagcgagtggaggctcggtgactccctagtgactgaaggggttagggctgaccgtcgagaggtcggctcgaggaggacgggggaagtagtgagggatcgatcgtcggtaatagtgatgacgatatcttactgcaacactcgcaaacgctttcggtggcggcagaaaagccctgtcgaagttctcaaaggtgttttgtggaatcgcaagttgataggggaagttattggtaagatggacgaatggttagggaaaattcgcaaagggtatgagtatattcacccggaaagcgttctgagggtttagattgggaatagactataccacggagagggtaatcatccacaggcaacgcctgccggagatactcgaagaccgtatcatcgaaaagtacggtctggataaagtccaggaatcggatcatcactggaggaaggtgtccgaaccggcgttatcggtcacgcggaagctcgttccccgaacaattgacgcgtagacatcgaacatccgcctggtcgctcgagagaccaccatcagctccaagaccgcccgagcgcgctcgtccacgggcacacgccgaccgtgtcgacgtcgtctcggtctcccaagaatcgagagttccgcgtcggtcctcccatccccaccacgagaagacacctcctactctgtcgtcatctcaacggcggaaccggggtccgtgcagcgttcgaagcgccgggacgtccatggtatcactcgtccccgttccctccgttaccgtcatcacctccatcgtcaccgtcgtctccatcgtccccatcgccatctccatcgccgttcccgtcaccgtcccaggccgattcggcgacggattccgccacctcaccgacggcgtcccagacgtcgtccgttcccccgtcactcccccctccgatcgcctcgtacaccgtctcggcgatatcttcggcggcgtcgaggtcgagctcgaactccatccctgcaccggccccaatccccgctctcgatcgacgcctccgggctcgcgccagcctcttgagctcacccgggctgaggaccaagagcgtcgagagtaccgagaacacgcgttcacttccgataatcccaccgaacacgaacacgtggcgtctccggacgtccggatcgatgtcgtccgaacccgagcgacatacccctaagaggacgatcacgggtcgttcgctccggtgcgatgggacgtccccggcgcttcgaacgctgcacggaccacccgagcgggacgatcagccctcggatcctgttccacgtgctcatccggacgtgggtggttcggagtcggacatcgaacggtatgaggtagggttcgaacgcctcgaggctctcggaatcgatcagacggagggcctcgtccagcgcgtcctcccgacctttggtctcccacacgttcatcatcgcgataccgaacctcagtgcgaccgatgtatccgggattttcaggagttcggacagctcccgatcgagctcctccgcggtaccctcaccccggaagacggcgtccgacgactcctcagccttctcgacgatctctaggatccgctcggccttgctccgcagtctccgtgaccgtcgggtgatgattagggtgccgaggaactgcgagatcgcgatcaggaccacgaggatcgcgaggacgtggatgacgtgataccacgacgtgggaggcacccccacccgaccggggtcccgagagtgccatctcgtgagctggagatcgtcgacgccgtcccccgtgccggcctacgtattcaccgccaccgttccagtccggaacgtacctcggagcgggagatctccccggatatcgacgaaccgacgcatccggaggcgaacgccacgatcgttgcagcggccgagggcgcgtacccggttcggaaccgcgggtcctacggcgtcgggccgtgacccagcaccgtcgatccgaggcaggacaacgggggcgtgaggacggtcttcgggggaccgtttcctccccctcacacgcgctcccgacgcgtcggtgcccctaccgggcggtgggaacgctaccctccggccggagcggctcgggaggtcgaccgagtccggtgggtgatcgtggacgaagggtccgacactcgcatcccaggtgagcgtccgtgacgtgtagggtttccgatcggcaacggagcccacatcgacgccgggcggtgcggatgctcgttggatcccggtggtgtgtacgcgggtgcgatcagtgcgggcggcgccgagcggtagtggaagggaacgaggtgatcgatcatcgaccacgctctccgacctatcccgcgcgtggtccacgttacggaacgtgcgcgggttcggacgatctatagaaaccgccacttattataagagaacattttagtttaacattttagtttcttgtttatcccagaccgtcgtgccatcacgggtcgaccgcggttcctaccctgcgaacgccctccgtagtaggatcgcgggcgtggaggtcgtccgtcgcgcgacgccatcgacttcccccagggcgacccgcgggtacgggcaccggccaccacaccggggagcccgcggacctcgagttcccctccggcgcgcgagtcggcatcggccgtcccagcgtcaccgtcccgagctcgaagaggtcgggtagtctcgggatccactcggccggtacgtagcaacccatgaactccacggggtcgggtccggctccgcgcctcccgagcagcgctcccccgtcgtaggcgacccacactcggacggtcgcgcggccgtcacggggttccaccaagtagacgagcacgtcccggcggttgacgccgtacgggtcgagcccggcgatctcggccgccgcccggacggggtcggtgtcgtagtcctcgaacctccctcggtcgtagtacctcgggtcgttcgggacgagcacgtactcgccctcggccagccggagtacctccagcagggtcctaccgtagcggtagacggcgacgcccacggtcccgtccggcgatccgacgaggaagtggccgatcccgatcctccggaggaggtccagggcgcgctcgaggtcccactcggtcacctcgcccgcgagtacgacgcgctcgcccagctcctcgagcccgcggttgaccgactcgtcgtccgcgccgcctatcgtgatcacccagccgtcctcggtgatcaccgtgtggcagaagcggccgttcctgagcttgtactcccgcagggccccacgaccggcccacgtcgtcacctccaggtgaagggtcgcccggtaggtcgcgtcccgccggtaggcgacggcgtagcccccgtgggtgcggacgaggacggcgctgcagtccccgtgggtcgggtgctggagggcgaccaggagcagggtcagggtggggtcgggcacgcgatcctcccccgcgggttcgcccgggttggaggtgcgtccgtgtccacgtcggggaccctcccgcgggtcacgcggccgcgggtactacccccacggtccggtgagtcggttccctcccccgggtgttccggtttaggtacgcgcgacccgatctcggtcgcaccgtgcgcgggcaccgattaaccctatccgtgacgccccgaccgacacactagaaaccccatcggaggccgtaccggcgtcgtatcgtcgccctccgcgggcagttcatgcgggtttacaaccccggcgttaccggtattccgaaggtgttctctaatataacagacagggccgtgtagtagagtaagtcgagtatagtgggtacgtcaccggtgagtaccccggtaattatcccgttgagtaggtggatcgaatcctggaatgcggtcgtaccgccgattataccgaacgtgcgagagtgtaattccatggccagtggtaatggaaggacggtgaggagtgcatgggtcgctgccttgtccaacagtatcgatagtagggggccagtctctatccccgacacccagtgccagaggccctcgaggagaccgtacaccgcccccgagacgatcctggggatcccgaactcgaccgccaccaaccgcttgaacggctcctccacgacgggagccatccccattgaaaccgtataaccccagtaccaccgctccaggacggggaagacggcgttctcggtcacccactcccacaccgccacgctcacgcagcacgggacgatcgccgggagtccgaacgatcgcaaccgctccacgatcgacttcaggatcgcgttggagaccagcgggtacaacaggttccagcacgcggccaccggaagtgccgaccacacctcgtcgtacaaccgctcgaagacgtcgtcgcgcccccaccggatctcgacgctcagaccgaccgcggcgtacagtctggcggtgagggcgagtagcgcgggcgcgagcgagagcgggctgctcagctggagcctgtccgccaggttgagggtcctcaggaactcggcgaggtgggagtcgggagcgagttcgagcgggtcgatcgtgatcgcgacgggttcgacgccctcgggggtcctgaccagtaggaagctccagtactcccggagcctctcggggaggtgggccagcttggactcgatctcctccagggtctccgggtcggcggtcgtctcgtcgaaggtcgcgttctcgtcgccgaggttcgcccggacggtgaccagggtcctgccccataggtcgtagaacttgacctcgacggtaccgtctcgggtgtcgaaccggtactcgcagtaatcggctctcggcctgtagacggggagtacgtcccggtacttgtcgaaccacgcctgccgttcgagttcgatcctcccgtcggactcgagtctcgcgaagacgacggagtacgttgtcaggaaggctactcgatcgttccagaggacggtcacgtacgatgggtcgacgtcggtgtcttccaggttgacgagtccgaggatcacggcgggcgctcggagggtcgtgcggacttccccgaagggggttcgaaccccgagctcgcgtccgtggagggaggcgttcgtggaggggtcgtccgtcacgagtccggcgttcgggagcacggtgaggtatcggtatggagggctgcctatcagtactaggtggtaggaatccaggtggcgggcctcgtgggacaggcgtgttagggcttcgaggcagtcggtcgcggtgtcaccgtggagtaccggtgtcgagtgcgcggggatcgggagggttagggaaaagaggaggaggtgcgtgatgaggacgcccgaggacctcaagccgtcggtcccctcccgaacgccgtcactaggactgggatcggtgaggcggctcggagctccaccgtccctgcgcggcctccggcaccccggtgacctcttaagcgtaacgatgatcgtcgaggacgggccgaaaccggatcgagtgaagggaaacaaatgtgtttaacatcacacctcgaacccgtgctcccgtaggagctccccgagcgtggagagcacccgctcggcggtctcgatgaaccgttccgcgtcctccctggtgtcgtaggggaactcgacccggtaacgcgcggccgtgtacgcgtcggagagcatcttcagctcttcccggagttcccccgcgagctccctcaccctccggtccccggtgacgtcgaccaggacccccaacagctcggagagcccgcggaccctggggtactcaccggtcaggaacgccagcgcggccttgatccccagtcgcacggcctgctcggcgtggaacgcggtccacctgtacatcccttcctccaggctgaacctcgcgagctcgagcgcctcaccggcacgttcccacagcgaccgtgcctcctcgtacgatcccgagggggccacccccggtgtcacgtggggacgtcccggactggtacgtgaagtacctccggaggcggtaccggctcttcctggagtacgttcggagatggaggtactgggttcgccggatcgcggaggtgatccgggagcgggtggatccccgggccgaggtgatcgtcttcggcagcgtggtcaaggggagggctacgggtggctccgacgtggacgtgctcgtcgtcacggagagggcccgcgagctgaggccccacgaggtggcggggatcgtggaggaggagctggacctgcccgaggatcacccgttcgagttccacctcacgaccccggagggtttcgagacccggtggcggcggttcctcgacgagtacgagcgggtggggtgagtccgttcgacggctgggtcccgaccctcgccggggttgtggtgcggtcggactttcggacgatcgtattaccatcgttcaataacagtgcatgggatatacagaaatgatgcgatatcgacatgagtgttagtcgactatcgtacgtgaacgctcataccgcccggccgcgcgggataacacatcgcggatcgcgccggtcggctgagttcagttaacgtaataattgccgtaccgtacacccggaatacgggaccgcgatccgacgtgcggggagtgaggtgtgctcggcgcggtcctcgcggcgttcctcgccctgcccgggcccgcgctcgccgactgctggacctcggtccccgggggttcacctcggtgagtggaccgagctgacggtcaccggttctacagttcaagcccacctgatcgtcggtatacgcgggtacgggctcgaggggagcttcgaggtaccgatcaaggtgctcgtgccgagcgatgcggagctcgtgacggcgaagtggaagcccaaggggggcggggaggtcgaggtcgagccggtgtcggtccggaccgtgacctggccgggcgacacggaccagatcgggtacctcctgaggtacaggagcgaggacccgctcggagccctgttcccggacggggtgatccggtggcgggagctgaccttcgtcctcccggtggaggctaaggggagcgagtccagcagatgtctgttcgacgtgttcaagggggagtacctgggtaccctggatgtgacggtgaccgcccgactccacaggggtaagggggaggaaggagaggcctggttcttcgcctggcccatcccggagagcccgaacccggcgtacgatgtgaaggttcacggtctgtacgtcgacttcgtgaccgtgtacgacccggagaccgggcggtggcgctggttcatcccggttatccaaccaaaggaccgaagctccacgtacgtgtacgtgagggtcgacgtcgccggtccggtgttcaccttcggtgttgagaccgatcacgtcagcgtggagacggtgtacccctgggacgagagggcgtcccagttcctgagtctgacccaatacctaccggtactcgtcgtgatgaagaaggaactccagcgaggtgaggcgaacggtgagacggcgtcgcccgggcgcggtggcggtggtgcggggtccacccggaccgggaggacggtcccgttgatcgtgccgatcgtcccggtacggcggaggtgactcgtccgtgcacgcctattccaccgagccggaacgtcggcattcccgcagtcgccacctcgaccctcgcggggtaggatcatcgaggaacttcaacggactccggtacggtcccgccaatcgggcaataacgcgggcgttacccgtgtctcagcttccagcgttggagttctaaccccacgtcggggacctcgtgtttcccgtcgagggacctcctgcgggagcggatgaccctcttcaagtgcgaggagtagtgggcgggccagcctccgagggtcctcacggtgaaggattccaaccggtcggggagttcttccaacacgtcccggattcttggtgactcggatggtctcgcgtcgaaggccagtgcgagcccgcgggccagtactcgtcgggcctgtttgtatggcagacccgagacttcggtcaggagcgtcttgagcaccgagcgtaggttgcgcatgaggtgccgggctagctccagaacctcttctcgatccagagagacgagccattcgacgaaccgaacgctcccgttctcgggcttgcccaggtagagggtccgcccgtgcttgaaccgggaatcccgacgccaacgggccacgtagtacgggccgcacgtgttcccgctcaccgtccggtaggtcacctcgaggcccggtttctttccacgacggtagacttcccggaggacgcggagggctcggatgcgctccacgggatcggagggtatcgggacgtgcgatccgaccaaccccggcacgcgatccagggtagtggctccagattgtatggaggcaaggaaaggacagccttccgggataaaagtcttgccgttcggaaggtcatggcgtcggtcggccttccgccatacaagtcggaccggagatcgcccgatcgggttccgggcgcggtgagtctcgtcgcgaaaaggaggggtggtggggacgcggtcaccggaggtcaggcgtcgtctcgacggcccgccagcggcaccggtagtagcggtagtacccacaccgggatacccgacgtagttccgccgcccttctccgggaacaggaactcgacgttcgggtgctcgctcatcacctcccgaagctcctcctcgctagcaccctgctcgtacatcccgaacacccgctcgatgaaccggaccagcggatcgccctcccgcggctcgaagtccacgaacagcggctcaacgcccgaccccgtgcgcaggacgcttcccaagacgggtccctccagcgacctagaaagctccctcatcctctcgaccaacgccgcgtccgtaaccttcacccgatccacgaggatcctgccgccccccaagtcgaaagtcacggtgatcgccaacggttcgccctcccggtaacgcgaccacccgccctccgggcggaaccccaggactcgcatgaccacccggtccgaatacacccagtactccacgtccgcgaggaacagctcgcccagatcctccctggcgatcacttgatcatcccgcttcaggaccgcggcgaagcgcggcggcctcccggcgagaataacctcccctacttcgcagacgtactgcccagcgagcgccatcaccttgtagtacgacacgccgggcaccacgaccaccgccgggccctgaacgtccctagcgacctggatgatcctccgccccagctgaacctccatccggatgctcccgggctccaccctgacctccggagcccccgtcacgaacacgtctttcccgggcaggtaacagaacctgcgagcgggatgatccgcgatcacgtgcggctcatccctccacttaggcaggacttgcttttggaagtactcgtgcaagtagtccaggtccttcgagagactaccctggattaacggttctcctgaggctggggctagtgctaggactagtcctaggacgaggtaggggagcaagccggcaccccctcaggtcggtaggattagtccggagtctggtgggctcgatggccgggtccgacccggatctgaggggaaccccgatcggatggaaaggcttacgatccgcgcgggatcctcggggtgcggaggtgacgcgcgttgacggcccgtaagatcgactcctggttcccggtcgcggccgtctcggacgagtgcgagcgcgagcgtgatctcgggtcgccggtggaggtcctccccgggttcaggtcgccggtcgcgctggcccgggcggtggtcctcctgagcctcgcccctgaggacaccgaggaggacgcgctgctaccgtcgttgcggccgatcgtcggcgagccctggaggacacccatcgaggtgccggacggggacgtcccgcggaaggtgtgggtcctcggcgacggttcgatcgccctcgaggcggcccggatggggcgggaggttcggctcgtcgtcaccgaccccgcggtcgcccggttcctccgcgaggtcttcgggcggctgttcgcgctgcgggaggaagcgctggaggagttggaggagttcctccacgaggtgggtgaggtactgagggaccggttcggggacttctacggccgtgaagatcgcgcctacctctggatcaagcgggtgaggtgcccggggtgcgggctcctggtccccttgatggagcatcgatgggtcgtggagggtcggtacgcgctggagctggacgtgccggaggacggcgacgaggtggagttcgaggtcgtggaggcggaggaggccgggcccgggacggtcagggacggtcgcgtgacctgcccgaggtgcgggaggtcgcggagcgtggagggagtccggcgcgacctctcgcttcgggccgcgcgtagggaggaggaagagcccgtcgacgcgtacctggcggtcgtggtgagggaggacggttcggtccgaccggccacggaccgcgacctcgagcggttcgagctggcccgggaggagttccgccgggaggagtgggaggtgccccgcggggagcctccggagggactcaaacggtgggggatctgggacgtctcgtggttgttcaaccgcaggcaactgctcgcgcacgtggaggtcgccgtcgcgacctcggaggtggacggggaccggtacgggatctgggcagctgccgtactgaccgagctctcccttcggaactccgtgctgtcccgatgggatcctgtgaccgtggggaccctgaggcccaggggttggacgtgggaccacggcgagttacccgtcccgtcggcgtggagggaggtatccgacgagatcaccgaggcctgccgcgagttagtcgaggtcgcggaggatgtcgaagtggaggtggtaaaggccgacgaggtgaataggagctggagtataccccgggatctcccggacgtgctgttccgggcctggtcggagctcgtctcgaacgtgtcggccggggtcggggagtggaaggtcccggtgtccggtggcggatgggctcgaacgagggcaccgctaccggtcgtcggcgggctcggttgggacgatcgagtttccctgatactgcggggcgatcggatcgcggggcgttgggaggagatcgtcgggtggatcgtggggtgcgggctcgaggccgcgtcggcgtggcccgtgatcggcgaggacgcgctcgtggtcccgctggtcgggcgcgagccggggcccgaggatgtcgactgggagggggtcgtcgaggaggtgaggggttccgtgcgggagctcctgcgggaggtacgcgacctccgcgggcgcgggtggaggtcggtgaggctgatcccgtacgccgccgccctgccgccgtgcaccggggtcgacgtcgtcaggcgggatggggactccctgggcgtgcgacacccggaggtgctctctgaggtgctcgcggtgggttggagggagctggtggaggccgtcttggagctcctggacgtggggctctcggacccgagggctcggttctacgcggtctacaggtcgctgtggggctacccgaggcccgacgacgcaccgggtcgggaggtcgggccgccgctgagggcgctgggactggatccgaacgacctcccttacctggacgcggacggtaggctgaagacctaccgcgagaggcgggagtcgcggctacggcccgaggaggatcccgtcgacgcgtttcacgcggcgctgctggaggtgttggaagacggtccgggatccgccctggaggcgctgccggaagaggtgaggggagaggtcctcgggctggccctggcggtggcccgtgcggcgcgccgtcgcggtgaggatcacccggaggcggagctggcgcggaggctcgtcggggtgtcggccggtgccgcggcgcggtgagccggtggacaccgagggaaggctccgggagacgataggccgctaccatggtgtcgtcctggacaccaacgcgttcgcggccctcgccaaggccttcgtggacgacatctgcgagaccccggtcgataacgtcgtgtacgcgttcttcctcgaggtcaaacggatgatgggtgagaacttcctcctctactcttacgaggaactccgggcggagtacgccaagcgcctggaagatctcagagactacgacgggcaggaggtgtgctacgcctgtccgatactctcggaactcttggggccgacggtgaggggcctctgctacctgttcaagggtcacgaggacgtgagcgtacacgatgatgtgctgtcacggccggagtactccgaacagctggagaggttgtaccggggactgcgacgcggggggtacgccgggttacccgagtccctgcggggtttcaagtgcaacttcgaggagggtcaggtcggtgacaagcacgtggacgtggcgaacgtcatggtggcagccgtcaaggggtccgtcctcgtgacctccgatcgtgggataagggacgcctgctccgagctgaagcccagatgtctctgcgtatatttcaaccccggatacgtcgacgaccccgtccgcgaggagttcgagttcgagctggttccccgtccgggaggcctgccggtcgggctgaggtaccgcaaggggatcgggaagttcacccgctagtccgtgacgtccggccgtaccgtgtgtggagggacgcctgacgaatccactcgaacttgagacgatcgcattactaccgtccgacaacgacacgtaaaccatgcgtagataatatgacatcgatatgagcactattcgactatcgtacgcgaacgctcatactgtccgaggtcggagccgccatccgtgctgcagtttccagcgttcgagttcgagttgtacgtcgggtacctcgtgcctcccgttgagggacttcctccgggagcggatcaccttgcggaggtagctcgagtagtgggcgggccagcctccgagggtcctcacggtgaaggactcgagtcgatcgggtagttcctcgagtaaatcccggatcctgggtgattcggagggtctggcgtcgaatgtcagcgcgagcccgcgggtcaggacacgtctcgcccgtttgtatgggaggctcgagacctcggtgaggagggtcttgaggacggagcggaggttgcgcatcaagtgccgcgcgagttccaaaacctgtttcttatctagggaaaccaaccattcgacgaagctcacactctcgttctccggcttgcccaggtagagcgtccgaccgtgcctgtgtcgagagccacgcctccacctcgcgacgtagtacggaccgcacgtgctcccgttcaccgtccgataggtcacctcgagactcggcttcctcccacgacggtgaacctctcggagtacccggaggactcggatccgctctaccgggtccgaaggtatcgggatgtgaacgtgcgatctcaccaaccccggcacgcgatccagggtagtgaccccaagttgtatggagacagaggtgaagcggcacctcgagatataagccttgtcatctcggaccccgatcgcatcttcggttaccatacaagctccgcagggaactccctccacccgcgggccggaggaatccccggccggtcaatccccgacgtcgacgagcctcaggacgtagtcgcggacggcctcgacgacctcccgggcgacctcgacgagttcccccacgtcgacgtcctcgcccgggtagtgaccgtaccgcacctcggaccacgcgtgggagagctccctcagctcccatcggtaccgacgcgacagctccccgaacgcgtccttccccgtgacccggtggagcctgccgagcaacttccctagaaagtgcgttcccggcggcgcctcgcccagagctatgagagccgctttgattgtcagctccacggcctggtgcgcgtggagtgcggctaggtcgttccagccccgctcctcggactcgacggccgacctcaggaacctctcaccgcgttccagcagctcctcgaccagcgccctcgtgtcgtcggattccgacgtcatgagcatacgaccccaaacctcgaaatctttcggtctcacgatcagcacgtcgacacgatcctccggtaccccggcctcctcgcacagttcgtacgcgatccgagccctctccctgaaggaggagggtgcgcgctcgctcaccaccatcacgtccaggtcgctcccgggcacggcccggcccttggcgacgctgccgaagggtaccacacgggcgtcctcacccagcacccgccgggcggcctccccgagccgcctcacccactcccagctcgggaccgaacccacggcacccgcccccggccccgtgcgtcgcatcgtatgaaggatccaggtgggaccgacggtgttaaggcggagttccccttccgaaggatgatacctcgaggaggaccgggggtatccccctcgccgcgcgttgagttcgcctccacggtgggcacctccacgctgaacaacctggcacgggcgctcgggaaaggtgacctagacgccgatttggacccgggagacgcctaccgcgccgcgaggaacccggaggcggttgaggagatcggcgaggaagttctcgaggaggctctcatggagctagtggaggcggatccgaagcgggcttccgccgagctgaacacgctcctgcgcatggcggagcgggccgagcgcgagggtctcgagatcgactcgatcgcgctgatcccgacgaagaccgccaactgccggttgtgcgcgagggtcgtggcggagtacctgcgggaggagggctacgcggtctgggagaccgaacccgtcagggcgggtgtggacccgggggagttctggtggggtctaagcgacctgctcgagcggctcgaggacgtcggcgtcacggacccctcgcggaacgtgtgggtggccgccacccccggcttcaagcccgaggccgccgtcctgacgctcgtcgcgtcgctgttcggcaagcccgtgttctacgtgcacgaggtcatgaacgagctcgtcgagatcccgcccgcgatgccggtcgtcaccgaccccgggttcgtgctcggactgatcgagctccggaggaggctcggtgacggcgcccccgaagaggtggcggaggaggtcctgaacgacctggcgcgggacgaggaggaaagggagcggtacaagctcttcctcgtggaggatccgcggagcaagaacatcggaccgtcgccgctggcccggctcgccgagtcgttcctggcgcttggcctgctcgcggcgaaagcgcggaactactccgttgagatccggaccaagggacacaccgtcccggtgagccggggaggcggtgtgaagaaggtcgaccgggcgaccctgagggagctcccgctggaggacgacaccctcgaggtcctggcgaccgtggccgcgctcgaaggcgtggatgacacctggttcgtggccggcgagtggacgaccgaggggacgcgtcggcacgcgaggaccgtggaggtactcgaaactcgggacgacgccgtggtcgtgtcggtcagggaccgacgggtgcacatctcgaggctcctgatcccgaccgaggatcccgagcgggtggcgcgggccctgaaacagctggtcggggcgctgtccgacgcccgctagccacgacgtgggaagtcacaacaccgtacaaccggcgcgcatcgggtcacctaggacccgaaacccaaaagttccacgatcggacggtccgtttcccgatgaccgaccccggatcggcccgcccgatcggacggcaccatcggagtttccgtagcgtcataaaaccacaattacgttaacgcgacacaccatccacaccgacgaccgcgacgcacggggggtgtcccttgcggaccctcccgatcgcgctgaccctgctgctcgtaccggcggccgcccacgcgctccagccggaggtcctgtggaagggagagttccccgactgtccggggagcggcttcgtacacctggtacccgtcgagaacgaggagaacacggcgctgctcgtcgtccgtaccttcgaacgctggtcgctgtacgaggtgaagggctccgaggtcacgcacctcggggacgtcgacctggccacgccgaggtccaccgaggtcacgggggccatgtactaccccgaccggaacgagctgctggtcacggccgtgatcgaggaggaaggggagggaccgggcggcggcgtcctagcgatcagggtcggacgcgacggggtcgacgcgcgtaagttcgacggcgcctacgtgcacgcgagaccgtgcccggacgggacgatcctggcgctgctccacgagggccacgagtacctggaggacgagggtgtccaccgtcacgacctcgccctgatacgcctgtaccccgacggtcgcgcggagcggttggtcacgttcgacgtcttctccacgctgccgcccagtgccctgctgatcccggggacgctccggatcgagccgttgggcgacgactacctgatcacgggctcggacctcgtgagcatggtcgagctcaggaggacggcttccggctgggatacgaggtactacggcccgatgaacctcggcgccaggataacctactacctcgaggagtcgacggtgttagacccccggaagcggctggtgctcgtccggcagtccaatctggacgagccgctcgagggttactgggcgatctgcgagctcgtcccggagtcgggactgggaggcccggtcctgaaggagctgcgccgggtcgacctcggaggcgatgacctgtacttcccgcagtcgggggtcaagctggaggtcggcgggtcgacgtactacgtggtaccggcggtgggcgcgtcgtcgacgaagctcctggtgctcggacccgacacggcccatgtatgggaggtacccgggttcagggagctggcggtgaccccgaggctctacggggcgagggtctcggagagggagacgggagggtgcacggtcgaggtctgcgcgttcaaaccctcgaggggcgaggagtggctgacgccgctcttcggcggcaccggggagggcgagaagaaggaggagcacaaggagaacgagggcggtaaggtcgcgatcgtcccggtcctaccggcgattccgttcagacgtcccggtagggcgtgagccccttcccccacttcttccccaacgggcgatcgcggtgctcccggcccggtgccgccgattctctcacgcctcgcttcccgacccctcacaccctccgggagcgacgctcacggtgaaccccgccggcgggtcccggcgatccgcctccggtgagcgcgacgtagcggcaccacctgtggggcgtacacccagaacccctccctcccctcggggaacaggaacacgacgttcggatgagccttcatcaaccgcccgacctccccgaaatcgccccgtcggtacgcctccacgacgtccgagatgaactccatcatcgggtcgtcccgcgccacctcgaaccacacgagcaacggttcgagaccgtcagccgtgcgcatcacgaccccgcccttcaacgtcccgacaccgtcctcggacgtgtcccccgtaggcctccacgggacggcgacgtgtcgggtccgtatcttcccggatccgaggtcgaacgtgacctcgaccccctgtagaggggcgacgtccgccttccggtgggaaactgtggcgatggccagctccaacgcggaggtaagcgggtcttcgagcagctgaacccgcatgttcacgacgtcgccacccacgaggtactcgacgtccagcagcggccacggtccatcggccaggaccacccggtccgacgatcccccgccctccagtaccgccgccggtggcacgtaggggcggggagcgaggggacaaccaccgtcgatcgggagctgaacaccgccgacgaccgtgcaccggtaaccgtctaccaaagcgctcacgtcgagggggatcggcgggtagagcccccgaacgaccacggccggcccttccaccactacggtccggcccacgcggtccaaacggatccggaccttcccgggttcgcactcgacgtacgacaggggtaggacgtccgagacgctcgtcacgctacccctcggacgtcccccagccggaaccacgaacgcgtccagcccggggacgtagacgacgtccacggtccgtccccggaacccgcgcgcgtcgacgacgatcctggcgtccgcactcttccacttgggttccacgacggactcgaagtaccgggccaggtacccgatgtcgtcgctcgccttaccccggatcaggggctcacccgccgacggtgtcgcggtcaggatcagccccagaaccagcgggacgaccgtcactcgcggccccgtggtgacgacgtttcgggagctcataagtccgtttccctttccgggtagcaacgtggggttttcatccgggcccgtaggccgtgcgtggaccgagcgtgccggttgagaggtcgtggaaccggcggcgttcgcttttttcatgaaattaattagagagtcccgatcctgtaccgccgttggttatactacagactaatcatgaaatgttataatattgttatagaataatgttaatgcactatcactatctgcattattacggtttaattataagtttctaacagttgtaaagttaataatcatctatacagcagcgagtacagtgcagtttcattacccgtgttattacgggttaattgcgagtctgttgtattggtattgggatgttccatgtgacttttactctggcgtatggtttcattacccgtgttattacgggttaattgcgagagacaaactagtagcgttcgcgagattcaaaggagatatcacggtgtgttcgtttcattacccgtgttattacgggttaattgcgagttttgcaatcgatgatgcttttgctagaatttctttcatttctgggtctaaatctcttaatgtttcattacccgtgttattacgggttaattgcgagcatggacatagacacggacatagacatggacacgtcaacggctgtcgacattctagccgtttcattacccgtgttattacgggttaattgcgagggcggccagttcttccggaggacccacctttacactatgaaactaccgaggggattcactatcccttacccaccagaactagcacatcggtcctatttaaagattgccccgatttcgctgaacacttaatcatactaaaatccaatactaattcgtttccgtttaaccgaaagccttatatataatattggtaataccgaaaaccatagctttctcttacgagtaattaatctgttaacttgatgaagtaataactgtacagtactcgtaaaccgccttaatacctcatgagaactgtaatcctttactaacagttagaattgttatcctttcgaagtgaagtaaggtgaaaatcttgcactgttaaagtgcactagttaggctgcaggaaaaactattaccagtattgataagtatgagtaaaagtggtaatacttcatactcaaaccctccggaacgaccgtttcctacggggaagaacccgcctttctaccaagtaagttaaccctatgaaaaaccagtacgagatggtacgaccattacttaaattaagtaatactcccatcagtaccgaacctcgccgtacccgtagccggcgcacgtcctggcgccgatacccaggcgctccacgccgtacttcaggagcctcagggcgacgtccagcgaccccctccgctccgagaccaggaccgtgcgccacctggaaccccgccggactgtcaggaactcgacgggcttgggtcgcatcgactcgtggggaggcccctctccctcgtagtactcgccgtagtgcgggttcaggacgtcgacctcgagcggcgagtcgacgtccctcaaccagtccggatccgggagcgcgtcgtggaaggtcacctcgccggcgcgcttggactccgatgcgttcccgtcgtcggactctttgggttccgactcccttggcttcgatccgaacacctcacggaagcgcttccgggcctgtcgggtgtcgtcggccccgaagtacttcctcagctcgtcggggtctccgcgttcgaggatcagctcgccggccgcgcgggccacgcccttgagggtcgtccccgggatcacgggcaggccggtcaccgggtccagggtgaggtcgttctcggccgggtgcgggccgcccatccccacgaccagcctggagtgcgggaaccggagctcgacctcgcggaccctgaggtgcgggctccggcccagctccctcagcgtcttcaggtaagacccgacgtacccgcggatctcgtcggagcgggccgctttctccgcggcgtccacgacccgtctcaggagccttcggacctcccgtctgaggttctcctccccgtcactcagcgcccggagggccagcgtccgtttctcgtggtacgggtgcgtccggacgccctcctcggggactagggactcctccgccgcctccgcgaccctccggcgcagtctttccacgcggtcgcgcccctcatcctcgggcaactcgccgacggcggccgcgttccgggccaggtcggcgagccgcgtggccagtctgtcggcccggggtagaccttctctctccagctcgcgttcgatccggtcgagcggcagcctcgagagcgcctccctcacgtcctcccgttccgcgagcaccagggcgcccggcagaccgtagtacaggaggaccgagcacagggtcgagaggtcacccttgagctcctcgtcgacgtcctcccggagccgcgacagcaggacgttctccggggaacgctcgctcatcccagctccccctcgaagttcaaccgtaggacgccgaagccgacggaaccgcccgcgccgagctgtaccgaggtcaccctccggaggacctcgagcgcgcgctcctcggtcggacccagcgtggacgcgtcgacctcgtacggtcccgcgaggagggtgagcctggggcaggaactcctcggtccagagggcgccctcctccacggtcttgtcccacgggccacccagccggacgcgggtgcggagctcggtgacgacgggccggtccgggtcgaggagcccggcgaaggtagcgtcgtcgaggattaggaggcgggagtgcagcggtagcttccacggtcccgggacgaccagctcgtccgcgacgccgtcgactttcccgttcctgcggaccacgagctcgcggtgctccagcaccacgcgctccgcggggaagcccgagggcgcgagcgcctccccgtcgggctcgggcgcctcgacgccgatccaatccaggacgtagggacaggtgagccagacgaggggcgtcgttttaccaccctccagcgcgacgggcgcggggacggccacgggcaggaggtccccgaacgtcaccgcgcccttggtgtctcggtcgccgaagagcacccgcagggcgcgctcccgccgctcctcggtgtcctcacccagatcgcgcaggatctcatcgaccaggtcgtccggcttctccagctcggcctcgacgtgggtcctcagcgctcccttcacggagctccccgggacgtaaggtacgcgggtgtgcctgcgccggatcagcgggaggtcgatcgcgccgggtcgcccaccagtgcccactcgggtgggggtcaccgtgagggcccagagccggttctccaagggtgttcaccccgccgatttcgacaccctcacgcggctctcggttacttcgatcccgtggcgctcgacgccgcggaacgaccggcgtagcgtcctctcgagagcgttctcgaccctcttccgatccccctcctcgaccacgacggtcccgttcccggggtgcagcttccctaaccacagcagcaggacggagaccacgtagcgaccgcggttcacgccgtcgagctcgaccggcgtcacggagaggaggagcggggatcgcagcagccaggggacccccggcgtcgctcgaacctagcagccaccggagctcctcgttcgagttctcgaacctctcgttccggagcctccgacgggcctccctgagcgtgccccccagacggtccaggagtttatcgacgcgctgcttcctccactcgaacgtccagagggtggcgcgacggaagctcgggaaggattccacgggccccgaggtaccgtcggagcgttccgcgatcagttccctgagatcgtccaggcacccgcggagcctatcgacgaagtcgtcggtaccctccacgcgggtggacaggtcgtcggcccggacctcgaagcacccgaaggcgcgcctgaaccgccggccgtacccaccgatcagggacagcagctccagggagagcttcgcaacctcgagtgcgtcttctcggaggccggtcagctcgagctcgaaggtcgctccggcccggatcacgagaggttgctcttcacgtcgaccgcgcaggtagatgggcgggcatagatagcaccggttgtcgacccgaagtcgaccgtcttcgtcgatcgtgatgcggtatcgccttcgacgcctcgcacaccggccaccctcctcgacgtcgtcctcacccacgcccctcctcagccgcaccgagaccggggagggtcggaggtccttcccctccgacggtctgccgccccagaactcggcctcgacgcggcggagcccgtccccgtccaggaaggaggccgcgacggcccggaacgcccacctgaactgtcccctgagctccgggggtcgggggagcggtccgtcccggtcgtacctcacctgcgaggtgatcgcgggcgtggcgaaggtgcacccgacggtcagggtcctcaaccgcggccccggtccgccgccggggatagctttgataaagttaattcagggagagtggcgaggcgccggggtgagccgggtgccgaagctggtcaccgtgcgcctacggccgtccggcggcatcaagacctggctccggggtcgtaaactggcggactccctcgcggcgagttggttgctaggctacctggtttaccgcgtgtacgagcggctgtgccgtaggctggacgtcgagagggtcctccgacccgtcctaccggggaatcaccccttcgagaagaagccggataacctggagccgtgggagacgcgcgggtgcgtgatgccggacgccgtcgagctggtcgtggacggcgacgtgagcgcggaggaggtcgcccgcatcgcccgggagaccgtggaggacgtgctggaggacgtcttgaagcgcggccgcgagaccccctggaggtgtcataacgtcagcctgtacgagccgctcgaggactggtgggagcgcacgtccgggaggtccgcggcgagggtcgagctcccgcccggcctgatccaggtctccgcggccgtcgtggacctggaggagccagacgacgaagaagcgtaccgggaggccgtccgccgcgtcgcgagcctcgtcgggacgcgggccgaggtgatggacgcgaggggatccgggggtcagccctgcagcgtctgcggtacgtacccgaccgtgggagatcgtgagttctgggaggagctctcggagcggctccctccccagctcctgaagcggtgggagggcggcttcgagcgcctctgcgccgcgtgcctgctcaagcgctacttcgggacgcacgtgatacgctcctggtacctggagaagatctcctggatcccgtccacggccgaggtcgcgatcaccccggtcaaggtcgggatactgaacaggtgggaggagctcaaggacgacgggggcttccgagaggctgccctcgggtttctgagggaagtgctaccggagcagctgcggcagatcgcccactacctcaggtgcgtcaaggaggtggatcgggcgggggagctcgaggaggccgccaaggacctgaagagggaccgcctggagcccgaagggctaccggaggacgtgaggaaggaactccaccggctgacccccaaggcgcccagactggacgaggagctgggggacgtcgaggattccctgatcgaggtcctcctctgcgtcgagggcaggttctggtacgatcccgaggccccggggggactgagggagctgctcgaggccggcgacctggagaacctctacaccccgtactacgccctcctgaagctggacggcgaccgcatgggcgagctcttctcgcgggacccggagacgacccgcggggcctcccgggccacgatcgagttcggcctgaaggcgatgagaatcgtgcacgggcactacggggtcctcctgtactgcgggggcgacgacgtcttcgcggcgctccccctgcacacggccctcgactgcgcgttcgagctcgaggaaaccttccgggagagcctgaagaagtggaaggggacctgcagcgccgggctggccgtcgtccaccacctccacccgctccgggacgcgatcgacctggcgtaccggctcgagaagagggctaaggaggccggcaggaaccggctcgcggtaggactgtaccggaggaacgccccggagcgggtcgcggtcctgaagtgggaggccgacgggaaacgcccctgggggctactgttcgagctcgcggacctcgtctccaggagggccgcgtaccacctgccgcgggactggtgggagggctggtgggaggagctcgacgagccgaagaacctgctccgctcgctgctcgggtacgtggcgctgaggcaccgaggtgagggcgccgacgagggtgagatcgtcgggctcgtggagaggatcgccgaggtcgtcgggaaggccggacccgaggacggcgacccgggcgcggaggtgggtcgcgcgctggagatcgccctcgagctccgctcggagtgcccggccgggggtaacgggggttgaccgcgcgccacgtggcggtcgggttcctggtcctgcctcaggaccgcgcgttcttccgcaggcccgagccattcagggccgcggccgagtcggtggcggagtcggagggtcccaagccctggaccgtggccggctgcgtccgcaacgcgctcctggaggtcaccgacggggacctcggggaggtcctggagtacccgcggaagctcgtcaggtcggccccgcccgggtcgatcggggaggccctgggggagacggccctcttcctcgggacctgggtcgtcgaggtgcggcccggggcgcccgaccggctcgagcgcgtctggtggccgtgccccgcccacctggcgaggtacgagcccgaaagtgggggcgaggccgtcgacctgctgagggtcgaggaggtcggggacgcggcgatcgcgttctcgggtcacgacgaagcactccgccgccggtacgggttcatgacgccgaaacccccgaggcccggctcggacgtcgagacccccgggcgctacgtcgacacgggaacgatctcgaagatcctcgcgggaaggacgcccgcgagaaggacgccggacctcgaggacaacgtcgcgggacccggggaactcctgcgtcccgagctccacgtcggcgtcaagctggtcgggctcaagaccgcggacgagggctacctgtacgccgcgaggttcctcagaccgggcaggtccccggtggacgggggtagtctcgtcgggttcctcacggtcctggcggtgcccgaggacgcgtgggacgacggggtactggaggacctcccctccccgggcggccgactcggccggggacggcacgcgtgggtgatcccgctccgcgcgggggactggtcggacgacgtcttccccgaggtggaggaaccggagggggacctcccgggcctgtacctcgagaccccgaccccgttcccggagggtgacgtccggtcctcctccccgggcgaccgcctgaaggcagaggccgtcctcgtgagacccgggagcccaagagatcgcgtcctccaggtcgagctcgaggtctcggaggtggagtccgaggtactggccgaccgggtgatcgagacccgccgcgtctcgacgtggtccggtaagcgcgcctcccctgaccacctggccgccgccgagggaaccgtgctcgcgctcgggaagctcgacgtcgaccccggcacgcccctgctcctcttccccaggatgggggatgaagacagagagctgctcgcctccaggctcgcgttccacctctccggcgtgggtacggcctacgccctgagcctaccgggggtgagcccgtgacggacgccctcccgtacttcctcgtgtgccggacgccgacgagggcgggtgcgggtcagcgggcgacggacgtgatcgacctacccctccagcgcgaggcgcacacgaagctccccgtgatctacggctccacgctgaagggcgccctccgccacgcgacgctccggaaactctccgaggagctcgacggggagacctccgaggggctcgtcgacgcggtcttcggggacagacccggcgagggtagcccgtcaccgggcgtcgtcgccttcagcgacgccgtcctcctggccatgcccgtgaggtgcgagcccggcttcctggcctgggtgacctcaccgtaccagctcggtaggctgtacgaggtcctggagctgaccggggagctggaggacctccgggaggccgtcgaggaggtcctgaacgactgtaaggacccgcgggggaacggtgccctcgcgcccgaggagggcactctcctactcgacaggatcagggtgagggcggaggccagcgacgccgtcggggatctcgccggggtgctctcggagacggtgttcgagggcgcgcccgagccccacttccggcgctacgtggaggaacggctcgtggtcctgggcgacggcgcgttcgcggacctcgtcaactcgtgcacggagcgcgtcgtccgcgtccggctcaacgaggagaagaccgtggaacagggcccctggtacgaggaacgcgtgcccgaggggaccgtcttcttcggcacgctgaacgtgcggcacgacaccgtaccgcccaaaaacggcgtcgacgcccggaaggtgctgttcgggaggtgggaaccggacggcgtgcccgacggggacgacaggaagttggaggccctcaaggaggccgccggggagctggaggcgggcgtgctcggggcggtcgccgacgggagcggggacggctacctggacctccggttccaggtcgggggcagcgagacggtgggcttcggtctcgtacgtctcaggcagttcgtgggggagtgagcggtgaccgtgaccccgttccggtgggccgtcgagtgcgtgagggatgtggagcggctgacgggcacggtctggaaggactccgacgacccgttggagacgtactacaagcgcgccacgagggccgccgtgatggtgctcgaggagggcctccccctgaccctcgcgttcatggcctcccggggatcgaaggaccccggcaccctgctggcctaccacctcgccatgtacctcaaccacgtcgtgttcgccgacgagcccgagtggtcggagctcagggaggagtgcttcggccggttcgacgacgtcgacgaggacgagatcgcggagaaggtcggagagtacgtccgggacgaggtcagggaggccctggtggagctggccgggaaggagggcaccctcgagatgcgctacgccgagtcacgggcgctcgaactgctcaacgtgatcaagcgcgtggccgagggttggcacaaggtgtcgaggttcgggggcggggattgatcccacctttcacccgtctttcttatgagatatcatcgaagattatagtatcatctcgtactggtttttcatagggttaacttacttggtggaaatgcgggttcttccccgtaggagacggtcgttccggggcgcttgagtatgaagtattaccacttctactcatacttatcaatactggtaatggtttttcctgaagcccaaaatatgcactttaatagtgcgagttttgcatcttatttcaattcgaagagatgacgattctaaccgttagcaaagaattatagttcttacaagatatcaaagctatctgtaggcactatgtaattattacttcattaagttaactcattaattactcatcaggagaaactataactttcggtattaccgatgttgtatattaaacttttgactaaagggaaacagattagtatcggattttagtatgattaagtgttcagcggaatcggggtaatctttaaataggaccggtacgccagccctagtgggtaagggatagggaatctcctcggtggtttcggagtgtaaagggtgatcctccggaagaaccgcctgccctcgcaattaacccgtaataatatgggtaatgaaacggtaatgaaactagtataatctccgttaattcatctgctacctctggtagtctctgtatttccgcaaacgctcgcaattaacccgtaataatatgggtaatgaaacaacgcctggagaaaagccttcggtaaacccctaacagacacagccctaagacccctcgcaattaacccgtaataatatgggtaatgaaacaataccagaacgtctcacccgcatggaacttcggcttcagcggagtaccacactcacagactcgcaattaacccgtaataatatgggtaatgaaaccgctgtggataaacgattgtccaccgtgatacatagccgtctaacccttcttcgtctcgcaattaacccgtaataatatgggtaatgaaacctgtcttcgcttctggccttactgtcttcgtgaatgttccaagctccaggtagtcaactatcatcctcgcaattaacccgtaataatatgggtaatgaaactcttgagtaggataccgttgatgattgcctctctcgtttcctttgcctcgtagcctcgcaattaacccgtaataatatgggtaatgaaactgtgctggtgctaagtgaaaagattgccacccaatgccctagatctctgactcgcaattaacccgtaataatacgggtaatgaaatcccactaccgtcctacatactgcagagaggtccaccgttgtttttatcccataactctcgtaattaattcgtaataaaacggataataagacattcacaaactctttaaagttataaattcaatcattctccgattaaccactattttgcaattaacctacaacctataataatatttgtggttaacctacgtacaatataaacgacgactatcgttatcggaggccattcgtcggccgaccgcgacgccgttcccgactctttgagggaagcgcggggactgtccgtggcgtccgcttacacgtggcgtaccccgggtccggatggtggtaccgcccgtcggctcgcgccgatcgcgtcgtcgggacggaaacgttacgaattacgtaactaatggcggggaaggggcgtcaggccgagatccaccggcggagcgccgccggcgtcggcaccggtagcacccaccacaccgggagcctccgacccttcggctcccgcggctgcggttcccgtttcactccctcagccccctcgctctctcccccgttcttccgccccttcccggtgcctccgtccggtttctccggctccgagggcttaggttcaccctcggtcccgttcttcgagctctcggtggcccctccggtaccctcggtgcctccggtcggttttccggggccctccggcttcgtggacgtctcccgggttcgatccgtctccgtcccgccgcccacgccgttcgcgggcttctcttccccgggtttctcctccgtcccctccttctcctcgggcttctcaccggtcccctcctcaccgccggtctgggtcccctcgatcccgctcggtcgcccgaagctcacgctgcgcacgggggcgggcatggggccgctgaaggtactcctcaggtagagcgttttaccgcgccactcgatcctcgcgagcgctaccacccggtagtccccggggtccacctggaaggtcgccgagaagtccccgtacttccccaccggcacctcccgggccgccaccagttcgttcccgcggtacaactcgacgcgaacctcccggatctcgatcctctccgacgagcccccccgacaccagcagggctctggacgtgctgcccttcacgcgtacgggcgacgtgtcggacgactcgatcccggcgaagagcgggatcttcagtccggccaccgcgaacacgtcgtccacggtaccgtcgcggtaccgagcgactatccggaagacgtacagggtgtgcccgtccacgtcgatcgtcagcacgccctccccggaccgaagctccccgctccagacctcgtagcagccgtggtagccgtagtcctcgtagaacgtcgccttgaggctctcgacctcgccggtgacccggtatctcaggaccagcgtggtcccccgctcggtgacgtcgaacaactccatctcggccctgacgtccgcgggtctccagtacccgtcgtagtacacccgcgggttcaggtacgcctcgagggcgcccatcgcggcggccgtcgtcccctcgtcgtccgaccagctcccgtactcgggtcccgtggtcgcgacctgtcctttcagcagccagcggacggtcgcgtgcaggtcgtactccgggtcctcgatcaggtcccggagcttcctcttaccgccgggcgtgtcgacctcgacgtccgtcgcgatatcgtaccacagcgccttcagcagggcgaaccgcagcacgtccccggtcgttcgcacgtcgggcgagccgttccgcgtccagaccggtccgtgcgagccgtccacatcctcccaggttacacccgactcggcgctgaacagccactcgaggcccttgcggacggcgttaaggatcccgtcgcggtccacgtccaacccgagccggtccgccagccggtacacgtcgatcagcgtcgagatcacgcgcgcgtgatcggccgggtcctggtcgaacccgccgtcgctcccctggtgtcccagcagccaggccatcccacgctccaccgcctcccgcacctcggagaacgcggtgtcgtccagccccagctgaccgccgacgacgtcgcggaactggagcaccctcagcaggagctccaccgccgaggccgtttcttcgggcttctcctcgcgccatctgccccagctcccgtcgtcgtcctgggcctcgaccagccccaggatcttctccctgatgacgtcgcggtcggtcacgggcgcgagaccctggtagacggtctcgtgcaggatcggttccagtagtctgttcacgtcccggaaggtcgggtacaggagcagccctatgcggacggccggccacgtgtccgcggggctcgacgccgggacgtgcaggggtacccgcgaggctaacgagtccatgcgctccgccgcgaacagcaccgggtacgccgtatcgaacgccgcgttcaggtgttcgttgccctcggcgaaccaccagatcgtggctcgctcgacggcttgcctacactcctgcccgatcgcaccgtactcctgggaacccgtccagtccagggccgaggtcggcgcgagcgccgccagcagcaccaccgctaccacggtcgcgggtcgcaaggtggcccccttcggttactgaaaagtaaccgataaataaagctcgcaacgcccgcgtccggcgccgtcctgccgtacccgaggaacgcgagtcgagggaagccccccttcgagcctgtcgatgggttagggacagcgcgacggcgagcgcgtacagtgggtacacctcgagcgtcctctccaccacccggtggtacagcaccacctcgtcgtgaaggggtaccgtggatccgctgcggaccgcgtggtccctccgcccgagcggtacgcgcccgacgtccttatccttcggacggtgtcggacctagccccctcggtcccgaccccggcggggatgacctccggggagggatgtgaacctctagaagctgcgaaccgtgatcgtgcgggacgaccaggagcagggagagcaggtccgacgtcccgtccggtggcgtgacgcacggttcgaacgccccgcgctgaatagggagacgacgcgtcgacgcggatcgaaggggccctccgggcgggttcccaccgtcactgaggcgacgacctcggcgggcgatcccacggtgcgcatcctatcccgacgtcggacggacggtgctccgccttcgggacgaccgcggcgattcaaggtcaggccccttctccggcgcgacgcggggtccggaccgtccgctcggtgcctcgacttcgggggagggggcgagatgttgcgcacgggtcgacgggcccgaccccgatccggtccctcgcggcggagagggcgttccgacggtggagggggttcacggtcggtgctccgtgatgtggacggttcggtcgaagacatccccgtacgggtccgcgggggatgactcgatcgacagtcggaaccgtttcgacccttcccggaccgggcggagcccccggagggtccgttcgaatcccggtcctcacgcacggtcccgacggtctccgaggtgagcgacgatctcggcgggctcgcggtgccgtccgggatccatcggagaccgtgggacgtcgccgcggtaccgggcccatcatcgggcccgaatgtacgattccggatacacgtaaatacgcttcgaaaacgggttaccgggtcggggataccctatctaccctccccggatgaccgtgagttctcgaggccgtcaccccggtgttcatcgggaagagttgtcctccggtactggctcagggcgctcctcgggcggtgttcggactggaaggaggtgcgcgggttcgaggcggccgtgttcggcgggaaggtcgacgacgagatgttaccgccctcggtgaacctggtgttagtcggagagcggcagatcgggtgctcagaggactacggtccggtcgtggggggagaccggaggaaaggttgggcttggaggttctacctgagtatcccgtacgggaggggtcgaggttcgagctggaggcccggtacgtcgtctccgagcgtgccgagcggatcctcgaggaatacgggctcgacgggaactccgtccggaaggccttcgagcggtccctgaagttcctctcgctgctgggaggtgtaggagcgcgctcgcgtcggcgcgccgggtcgctgatgtgggaggaggtcgtacttggggatggattacgggagcacgtcaaatagatcgtcgactggatcgaggataagctgggcgacggactccgggacgaaccgggggttccccgcgttcagggatggttactttgcggtcggcgtcgggccaggggcgaaaagcctgaacgaggcgttggagtgcgcctggaaagtttacgaccggctgaggaatgagtcggagaataagagacgaatggggcactacctcgggatcggtcgcaggtactcgcgctcacgggttcacttccaggtcaagcgcctgaagaacggtgagttcgtgcccgtggtgacggcgttcgcggggcggaggaaggagaggggaaacctgaagggcgtccggaaggctatggggaagagttggacgctttacccgtgaggcggcgtctccctcgcatcggcggcggcactatcggcggaaccggtagctcgtgcttcgccggtttctcccgctcgggtttccgacccgtcttcggactcgaaggctccttcttctccaacccgatcaccgcgaccacgggcacgtacgggaacccgaacctcccggtgacccgcggccactccgactgcacgacccgttccccttcctcccgcacaccgacgacatcgacggcggcgccactccctccaccacttcctccgagcgtcagtaccaagtggtccgtgagcgacacgttcgtgaaaccctcttggatgtcggcgaacccaccgggccacaggaacaggacgtgcggactccaagcgtccgatgtcgcccaacagttgaatccgcctccccgtcctgaaggctgtagcggcgcgggccactcgatgcacccgaaatagtagtaagatcctagctctgggtagtgtttcggtcccgcgatcggtagtctatcgatctcttcgggctccctgtgggcggtcggtatcctgagcttcaggaccagggcggagcaaccgtgcctccgctcgtcgtacttaggcgtcacccggaagtcgagttgggtccacctccaggtccagccgagcactttccacgtgacctccgagcggctcacgggctcgatccgttcccacttgacgttgacatcggggctgtccaaatcgatcccctcgatcgggtataattcgggatagaacctggcctcgagcacctccgtgccctgcggtaggagcacgtgcagcgtcaccggcttcccgggctccttaaccctgatgtacgcgcggtactccgcgtccacgtggtcgacgacttcgactccgtgatcggattccttcaagtggacgtcctcgattatcaggtcgctctgcacgcccacgtccaggagcgcctccggacccacccaagcgtcaccgtgaacgggcaacggtaggaccagcgccaacagggccggtaggaggacccaccgcaccctcacgcggaggccccgcgatgggagtgcggcggtgcgggattactgtttttcgcaacgtggacgtcgtgtggtgaaccgggaagccggatcgcccggtgtaggaccggaacccccgaccggagggtatctccgccacggtcagcagcccccgttcccaccgtcaccaccgttaccaccatcgccccagtctcctccgtcgccgaaccagccaccatttccccagcccccttccatcgattcggcgatttcagcgatgctatccacgatactctcgaagatgccaccggactcatcggaatcccaccagtgataatccccgaggccatcgccccctgcgcaccaaccgttatggtcaccgtcatggtcccggtgccgtcgggacccgtgtccgtcgtcggtcctaccctcgtgtgggtggagctcggagaacgtctccccgagcgggaccacgccgccgaaggcgagcgtccaatcttctgctgaaccgcggcgaccgacccccagcagggcgacaatcggggcgcggtcctccgacctgcggccgagcgggatcgcgataccgcggaggtcgtgctcggtcttgaactcgtaccggctcgttggaggtatcacgagcgtcacgtggaaggtcacgaggctaccttcctcggcgaattcgcgcagggcgtccccggaacccacgatcttcagggcttccctcagcgcacccctacaccctttgatgtaacccctacttcccactacgaactgggttcccttccctcccgagaggtcgcggtccggcaccttcaggagtccggagagcctgcggtcgagcttgtccggagtaccttcggctctgaagacgacaccgacgatgtcttcggcctcctccacgatcctcgacgcctcgcggaccaccttacgccccgccgatctcgccgaccagagcgcggcgatcagtagtatcactgagagtacgatcacctcacgatccgccagtctcgccgaccataggacgacgatcagtggtatcgtcgagagtacgaaccgtacgggtgcggtcatcggtgccgatattagcagcagtacgaatagcaagagcagtgaggggaggagaccgaagacgaagaacacgatcgccgtcgtcaggccgaggatcactatccagacgtcggagaacagttcgagccatcgcagggcgaggagcgtcgagcgctccccgatatcgggtgccccctcgacgccggcggaaccacggattctcccggcggtataagccttacgataagtatacggtggccgggcggtgccggtgcgtgtcgatacgaaacgcggcggtaccggcggttccatcccgcgggtcgtcctggtggtgactttcatccccggatggtcgggtcccgtgggcggacctcttcacctccgtgtcgctggacctcgatcacgtaggaaacgaagttgttgtaggagagcacccggtacgcctccgtgtgcaggttgagccacatgcggaccgcggtcagcgcgcacaccgtcgccgaggcgcaggtccccatcaggtagcccagggcgagccacttcacaccccaccgatgccacgccaggagctccgcgatcgggacgagggagagcgccaccgtcgcctcgatctcccggcggaacgtgatcagctgcgggtacgtgtagaccaccagcgcccccgggacgctccccagcaggtacagtaccaggaggtccgggttcgcgccggccagttgccgttcgatccacttcaccagcgtcgccaggttcccgaacggcgggacggggacggcgctgaccgcgtggatcaacgctgacgacgccttcaggaccggcccgaggaggtacgcgacgtcccccgacatccagtagtggaaccgaggtctcacgaacgaggcggtcaccagcgccaggacgcccgagagcgcgagggcgatcccggcccctttgatgaactggaggaacatccgccgtcctatctcctcgagctccctcgactcgaccctgtagatcctgtccaggtcgtccccgacgtcgatccagaagatcccggccgcgaacgtgccggccagcagggggaccatccccacggatgccgggacgtcgagcggtgggtacgggaacccacgcccgcaccagatgacgatcttgtcgaagaacatcatggcgtagtacgcgatcgaggacagcgcgatcacgaagtagtccagcgccgccgcggcggccaccaccaggcaccctaccaggtactccttggtgatctcgggagggttctcgaggtgtttccgcgcattcgcgacgaggctcgccgtgagggtgatcgccaggagggacgacgagagtacgaacgacctcaggacgtcggaggtcaccgccgcgaggacggcgaacgcgaccgagaacgccgtccaggaggccacgatctgtaggacggccttccaccggtactccttccagctggccgcgaccatgcaggtcagggtgtagacgatacccgtcagctcggcggccagaacgacgtcgtgcgagagcttcagaccgaaggactccgagagcagccggctcaggaggtacggcacgggcgggtagacgaccgccaatagcgcgagcacgccgatgacgggggacagtaccccgaggtacctcgcgtccgccaccatccgcgaacctaagacctggaagggtgaggacgagagcaaacccacgatgagaccgaaactgagcctgggtaaatcgttgaaggacatcgattccaacagtgccaacagcgtgatgacgctccaaactggggtgaagagtaacgccgatctgacgacggacttgaggtccgcccttcccctcctcacgccccggatgaccttgtcgatggcgtccgataggaaccccattcgatctcacccggggtcggggaccgcgtacttcgcgtatcgacgcgtgtactcctcgcacatcctggtgacgtcgaacctccgggcctccctcgttgccgtgtacgacatccggaggagggcctccgggtcttggagcagttccaggagggcccgtgcaccggcctcgtggtcctccgccgggaacgtccgtcctatcccttccttgacgatgtaggggaccgcgcccacctcggacgccaccacgggacacccggtgctcatcgcctcgaggagggccatggggagcccctcggacctgctcgagagcacgaacacgtggaacttgtggtagaaccgcaggatctcctccggagactgggatccgtggaacttcacgacacgctccagcccccgccgctctacgatctcccgacacctctcgtagtgctcccggtcatcgatgggtccgaccacgtggaaccggaccctgtcgtgtcccatctccttggcgaccctcgccgccatccggacgaacacgtcgatccccttgatgggttcgacccgggcgaccgtccccacgtggagtctgtccgcctcgcggaacttcctctccacgtccgagggcggtggaaacctccaggtctcgatccccgagtagatcacgtcgatgcggtcctccggcgcaccctgcttcacggcgtgctcccggtggtagtcggagatcgccaggatctcgtcgcagtaccggtaggaggtctcgatcatcgactcgaagcaccgccggtacagctcccgggctacgtccccgagtccctcgaggcgtgtgtccagctctcggatcaagacgccgtgctccgtgatgatgtacggggttcctttgacggccttcctgatggcgcacaggaagccacacacgccgcagttctgcgggtgagccacgtcgcactcgggcatgtggcggacgcccgatgccgcccccatgacgaaggagcagacgttcgacaccgcccagtacaggtcgctgaaccgctcgtccgaacccagctggtcctccacgtaccgggccagcgtgtacaccgtcggtccttccagtactttcacaggattctccgagacctcgtacaaccgtttcagcatctcctcctccagcggctcgccctccagtatatactcgaaggcccgctccaggacgcggaaacccctgggagcccactcacctcggcgtcccagcagccaccggatcctgtgaaccgggaacacgcgggccgcccagcggcgcttccccatccgtctcggtaccaactctcggacgaccacgtcccggacgttctccgggatgtccacgaccggctccgtcttccccgggggcgccaggcagagcacgttgaacctgacgttcggggagtgctcgatgagacgctgtacccaggtcgtgactcccccgagcgcgatgggatacgttccctccgttacgatggtgacctcgggcccacccaacatgatcacccggtattcattactgaaaatacagctcgataatgtacatttcccatatgggttacattagctaacgttaactcactcgagcattgacggaactaacatcttgaaaacatcagccggtcggatcgtcggccgacacgggcctctagatgatacccgatacggcacgctgtctctgggtccacggagcgagggagggtatccttcgacgtgtacacgggtcaccgatcgcgcggatagaatcctcgtcccgttaacgatacccaactttctgctacgttaaaccaacgtgatcgggttgagtatcacgtgacggtaggatgaccgcaggtagtgtgtatccgttcataagacgcccgcaccctacggtccggtggtaggttgggaaggccgtccacggctcggaccgggacgcacgaaccgtcacgactccgacgtcagcttccgggccagtcccttcgcgtccttcacggtcagcggtatgtacccgcgacccctcaggtgcaccctgaccgtctcggccacgacccgcgtggtgccttccgtccgctcggtggtcctccatcgtgaccacttccgctccctcgatcaactgtcgcggtatctcctcaccgcgtttgaagaacccgtagtcccgcacgatgaccagccgatccggctcgacccggacgtgactgcacagcaggtacgtcaggatcggtagccccctggaggatcggcgcggatagtcccacctcgaagtaccagctggccgtaatgccgaacttcacgagcttcgcgagcgtgatgacaggctacccaccgtcgcgacgcggtacagccggatccggttgcgaccgacggccccgccgtagaaccggtagcacctagcgttcaaatccgtccgaggtacggtgccgcgaccttcatccgtattcctcgatgtctcgaaacctttagaggatgctatctcgaaccctcacatctcgcggatcgcccgggcgagtccttcggtgtccagcacggacagcgccagtttctcaccgtccaccgtcctgaggaccgccgtgtcaccgaggatcgtcacgtcgacgacctcgtcggaccgcacgaacctggagcggaagggttcccacacatcgagaccgtccggcctcacgacgacccttctcatgaacgaagagaacacctcgaaggcgcccggtaccgacgccgttacgatcgccacccagacgaagaaccagatgtactcggagagggccctcggccccttgaccgacaggatcaggaacgaacaggcggccatcgcgatgggcacggacggcgccagggcctggaaggttccccgaggcccgggggtcgtagctcgggtactccggccactctacccgcctcatcccgacctccgactcctcgcggtgtcggaactacgggcgttacgtttcgaacgatgcggtgcgtccggattccagcggtcgtatgacgtcctcggggtatggtgcgtaggacgtacacggacggtacgcggtggatatcaccgacaccgtgtcctgaccggaccacctcgggcgcggcggctgcccgacgggcggctcgtacaccacgacctctcaccagtccgtctccggaggtcgtccaccaggtcggtcacgtccggacctccacggcctctcggaggacgcccctccacagggcctcgtactcctcgggatcgaccacgtgcatctcgatggggtgcgcccaggattcctccagacccagctcgcgttcgatctccgcgacgatctcggcgcgttcgagcggtttctcgggcgcgtttccgctgacgatcaccaccctgagccggtccccttccaccgacgcgtacaccctcgtacgccctccgaggaggtcccgggcgacctccgcgatccgctcggcccagtacctccacctagtcacgaacggccggtactccggggggacctcggccgcggtcccgtgctagggaacctcggagagcttcccgtccaaccacatcaccaggttgtccaaggcggcctcatcgagctccctcaggtacgtgggctccggtagttcactcccgtcctcgatcaggtcgtactctcgatcggtcctgggatcgtagaccatcacgcggggcgcccagccgccgaaggcgtccttcacgcccctgtacacctcctcgacctcctcggggtgctccgacgcggtctttacgatcgagcccgcgccgagcaccgccaggaacgcctcggggacggcctgtgccgtcctccccgccacggtgatcatctcatagagcacgtcctcgaacgcggtgagccggagggccgccacggtcgcgtcctcctcggagaacccgtaccggtccatcagccgctccgcccgccccctcacctcgcatcgacgcgcgagcaggagggccaccgacaggtcgggggcgtagctggacaggtactgcctggcgatcaggaacccgcttatacccatggcctcgcacccgaccagtcccacacccacggtccccacacccagcgcgccccgcctggcggtcgcgacgtccttcaggtcgttgcagctctcgagcctcctgaactcgacgccgagacggccgtccctcctgagtctcctgagcccttcgatgatcctgtccacgagcgtctccgccctgtccaggaacgcgatcctgtgccgtcggaggtcgagcctcgtcaggatctccaggatcaaccccacgtccttctccttccgcaggtacagtggcagcaggtaagcgcgccactcgccggacgcctccaccgagacgcgaaccgacggtctctccagcacggggcggttggcgatcaccacgtacgccccgggcaacccgtagtactcgcccagcatcagctcgagcgccttctccaccgagtcgacctccggtgcgaagacgaccccgccaccggtggcgagcgcgatccaaccgccgataccgacctcctcacccgttctcaccgcgtgatccagctcgaggagggcccgcacgacccttacgcgtcctttacccttaacgctctcgatccactcctccaagcggctctcgacgacctcacggaccttctcggcgtagtccccgaacacgacgtcccggagcttccccctggtatcctcgctcgggttacggtccagggccgcccagaccgtgctcaggtggacgagccggccacccaacgactctctcaacgagtcgcgcacgatgccctccttgacctccgccaggagcgatcggacgaggccgtggtgggcgtcgtccaggaccaccaacgacccgctcaggacctcgcggagcctgtcgacgctcatgtgaggttcctcaccctcctcccgcatggcccgctcgcgcgattcgacgaaccggggtaggtccccgagcttacggtaggtcagcaggacgacgccgcgtttcaccttcctggctccgaccatgaagttgtgatccctgaccacgtcgcaatcgccgcaccgctcccaggtgcacgggccctccacgtactcgcgaagacgctcgaagtaaccccaacgcccgagctccatcgggtccccgtcggcgcgtctgtacacctcttcgtagaactcgggggtacacttgggcaaactggagagtttcggatcttctccgaagttcttcaggaactcgctcacgggtatctcgcactcgtagtcaccgagatccttcaaccggaggacgtcggaggagcccgagagcttgtccctcaagacccgctcgacgtcgtccaggagcggctcgggggcgacgtagaagcatatataggacgcctccccggccgtcagcaggttctcgacgaccctaccgaccgtgtacgacttcccgaccctcgaggacgttccgcaatccggcatcccccacgcgaccgcctcaccccggagtgacgcggaacgacgtcgcgatcccgggaagggcacccccgttatcccgtaggaaaataattgaccgacgacaccacgacggacgccgtcacgggggtgcccggcatcgaacgtctccgtatcccggctcccgacccagggatcccgcagcccgggggaccggcgaaggtgtcgtgaccgacgtcccgcccgttggggcgtccgaactgaaggtgggcctcggatctagaacgaactgatgggtgtaagggagtaacgaccgaagccgaccccgaaaaacggttagtaacctcgaaacgcttcgaccggtgggagcggttcacccgaacaggaacgactcgacgagagcctcggcctcctcgtactcgccctcgtcgagcaactccgagaggagatcggcggggtcgtactccgacccgctctccatgaggacgagagcgtcctcgaagatcctcctcgcctcgtccagcatcctcagggcctcgatcaggtcgagcggactctccgcgtccagggccgtctcgacggcctcgtccgcgagtcgctccgactcccagatcagctcccaggggtccaaaccgtttttcaccccctccctccgacgtcttccagggcccgtttgagggcgcggcgggcactatcgtaggcctcggtgccgggtttcactccttcctgctccaggtatcgctcgaacctcgcgatgagctcgaggttcacggtctcgcgcacgacctcgtcgacccgtcgggacaggcgcaggagcgcccgtcccgtggcggtgtcctcgccgaccctcgcggcctcgcgcctcagatgtttccggaggctgttcatgacccggagcatcaggtccgggttccgcgccagtgccttcccgacggcgtcccgcccacggatcgctcagaggtcccgacctgatggcacgctcggacggtaaaagcgttgccattcacccccgcgccggtgcccgcggaccctccgccgtcgaccagacccgatcttgtatggtgcaggagcgagggcatagtcgggactcaggatggcaaggcttttatcttaaggcactgtctcatcatcgctcccatacaacttagatgcacctgaagggaccataagccggggttggtcgagtcgcacgctcacgtcccgataccctcggaccccgtggaacggatccgagccctccgggttctacgggaggtgtaccgtcgcgggaagaagccgggcttcgaggtgacctaccggacggtgagcgggagtacctgcggtccgtactacgtcgcgaggtggcggagggactcgaagttcagacacggtaggaccctctacctaggcaagcccgagaacgagagcgttcggttcaccgaatggctggtttcactggatcgaagtgaggttctggagctcgcgcgacacctcatgcgcaacctccgctccgtcctcaagaccctcctcaccgaggtctcgagcctcccatacaagagggcgagatgtgtcctgacccgcgggctcgcgctggccttcgacgccagaccctcgaactcaccgcgaatccgcgacctcctagaagaacttcccgatcgactcgaatccttcctcgtgaggaccctcggaggctggcccgcgcattactcctctcacttgaacaagatcatccgttctcgaaggaaatccctcgacgggaggcacgaggtacccgacgtacaactcgaactcgaacgctggaggctgaggcacgaccggtgaacgccggagaagggcgtcggaccggcgcgggtcaatcgcccccgtcaccaccgtccccgtcgtcaccgtctccaccgtcacccacgtcacccactccgtcacccgtgtcctcgtgtagacggtcgaaccccgagaacacccacccgacgggagacccaccgaaggccaactcgaactcatcgtcatctcggtcgaagatggggtggataacatcgtgtgatgatatcgtcgcggcgacccgtccccccaacagggcgaccatcggtacgtcgtcctccggtttacgacccatcggcaccacgacgccgcgcaggcggtaaccctcggtctcccctcgagtctcacgcggaaggtcacgagacgtcccctcccgggcgagctcacgcatgttctcgtccgaccctaccaccccccaggaccctcctcagcgagccgcgacgcccttcggcactcccccggaccacgaactggaccccggtcctcagggaaaccgcgtcgtttggtacctctagaagcccggagagcctcgaatcgagctcgtcccgggtgcccctcccttcgaaggtgacgccgaccaggcctcccgtcgcctctaccacttcgagcggatcacgtcggcacacacctcgtgcgaacacgagatcagaagcacgatcgatatccgggccgtgaagggcgccaataccatcgccacgaccgtgggaagtgacggtacgatcgaaggggccagcaacacggccgacagcaggaggacgggtgagaccatctcgagtctcctgagccgtcgtggggcgcgtaacgtccccacgacgtcgggcaccgtcggacactccccgacatggtcggtggaatcacccacggtggggcgcgtacccgacggccttacccccacgcggtcggacgcccgcccgggaaagatggtaaactgaagtgtttcctttttagataaaccggtttccgaataggatcttaggactcgcccgacgccctcgctcgccgaggtttaccatacaagaggagaggggagaggaccggacccgcccgaggggccggatcgcaacgcgtgggatcagaaccggagcccccgcacgccctccgcgtcgacccacctggcgaccctgaggcacctccggcacatcggcacgacgatcaggctgtcaccctcctcgaagtccacgcgggcgacgaccctccggagcacccgagcgtgcacctccggctcggcgagcagcgcgtacgtcgaatactgcagcctgaacgccccgtgggactccagaagctcgcgcagcttgcggcgctcggcctcccctcccggttccttgaagtcgtagacgtagaggcggaggcgcggggacggaccccccaggacgcccaaggtcaccaccctcagaccggccagggccgctccgagaccgggtccccaggacccaccgagaccccgtacctcgcgagcctcgacgcccgatcggcgtagagcaccggtgcaggcagacgactccacgtcccggacgggttaccccagttcgaggccgtgaggtcatggaccagcccgatcaggtccccgtcgagcttatcgtcacggcggcgcagcgcgatcggcctcggggtcccgggcttcttatcgccccgtctccgcggcgtgtacggtgagcagcataggtggacggtcgatccgtcgagccgcacgtaggcgcccctaggcgcccgccacccctccccctcgatcgcgtagacggtcgggtccgacttgatcacctcgacgaccgtcacgtccaatcccagctcccgtccgacctcccggactgcctccagctcctccccaggaacggtcccgtccctgaggtagaccacccgatccgagtactcccgggccgtttccaggacgatctcggccgtcctccccgacgtctcgccccgctcccccacgggcaccgtgaacgtcctcccgtgctcgatcaggccatcctcatcgaccacgaagcacgagcagcaggcccggccctcgaccacgcgaccgccctcgaccttcctcgagacgtccacgccgaccaccgcgacgtccttcggacccgaggtcgccctaaccgcgtacggctgacccgcgtgcttgcagtggatcccgaccgccaaaaccgtcgccgcgtacttcacggtcttcccgtcggagaggacgcgctccgtgaagcactggacgagcgggtccctcctcttgaccctcgcgtacgtccgatcgtcgtccgacagcaccccgaccagcaccggcccgtccgcgtcccccaccaagtccgggaggtccaccgcgtccgcgactctgacgtcaccggcctccacgtcgtgaccgaggaggcgccgcagcctcccgacgaccagctccagcaggcgctccaggtcccgctccgagatcccggcgcgccccgggagctcccgatcggccaccaggtggacggcctccccgtccagctcgcccgcaccctcgtagggaccgtagttccacaggagatcgttcaactccgtccgcttaccacgtttctccccacccgcgaccacggccggcggtcggaccctccgcgtgtccgtggaccccgggtgctccctcacctccaccgcgacgtccgggaacctccgccggaactccccgagaccccgatccagcaggtaccggccgaccgagaccctgtccgcgacccccaacctgaagtactccgtcaccgggtgcacgggtacctgccacctcaggacgtcatccgggtagtggagaacaccaccgcccaccttgaccgtcaccacgacctccggatccacctccacgccgtacccggaccagtgctccctcaacctctccaggtcccacccgtcctcgccctcccattcgtcggccgggacggcgtccacgaccttcagcctcctacccgtgagcccaccgtcagtggggatcacgtacgtccccgggaggacccgctcggcccaccccacgccccgatccctcaccaggtccttgagccggaccctcgagatcgccctcgccctgggatccacggacaggagcacggtaccgtccccgagggccctggcgcggacctcgagccccagcctcacctcgaccggaccgtactcgcgacccagcgtcctcaggacccgatccctgacctccctccagttaccgagcgcgtacacgcccgggatcctctccccgtcgaacctcccaccgtaacagacctcgaagaagtcccggtcgcacaacagggagtacccggtgtccagctcgaacccgagcccctccaggccgaggcgcagggcggcccgcaccgcgtaggccctggcggtgggggacaggtcatcccagctcacgcgctcgccccgatctccggccgagtagacgacggtgtccacctggaacgcgaactctctctccctcaagtggtccttcacggctccgcgggcggcccctcgatcgtggtagtcctccctacggagaacctcgaagtccatccggacccgaacagcgttagacctccagggcatcccacacaacccccacgtcctcggggtcgaattcgagcggctcgggcggggactgacgcgagaccccgtcgcggacctcgcggatccgacggtcgaccgcctcgagcaggccaccccggaccctgctcaggacggtcaggaccggggccgacacggcgtcgagatcgcgcaggaggaccgcgtctcccttccacctgaacatctccctagacagcgagccgtccaggaagcggcggagcacggggacgtccacggcgagcgccctccactcctccatcaggtccaggatcagccccggccgcctccccctgggaccgtggaggaaccccaggaacggctcgagccccgccgccaccgtcctcgagagcaggaccggcaacagcacgcccgcgtacccgaagctgatcgccgcgttgaacgggtccctcgggggacgcctcgtcctcctcccggagaacgcccagtcgggtaggacctccgccagggcccggaagtaccggcaggccgccctcccctcgtaaccgcgcagcgcgtcggtggaacccgcgttcagcgccctctcggcctcggacctcacctcatcagccgcgtcctctaatccggtgatcccggtctcattggctaggaactcgaggaccgcggccctggccaggatcgaggaggcgatcagcggacgggcgaaggcgagacgcgccgacggttgtgaggcgatctcgtactgcttcaacctcagggtcgcgtaccgctccgagaacggtacggtcacgcccaggatccggttccctccgaggtacactatcgggacctcgtttctgagcgctaaccgcacggcctgggtcgtgatctgggctccacccgcgatgattatcccggtagtacggaccgctgagtacttgctcttcccgatccgaaacgcgtcttctctcctctcgatcttaccccttctcaggaagatcacggtgtcgttcggggcgcccatatcggacaccccaccgtccaaagaaggtaggttacgggttgatattatttacgccttagtttgacgaaaatatcagtatatatattatttttatgaacgatttctcggcgctcaagccttgaaaccggggaattcgaggtgcggtgatcgcctgggatcgggatcgattaacgcaaacagcttatattgaccggacatatgctcgcgtcgcggcgcgttcctaggacatgattacaccagcgtacaggacgctgaaaggttggcaactacgctcggaagccctgcctgtcgaccccgatggctctacacgcgcggtacgacggatcgacggactccgggcgtcttcgggttcgagacttcccgccaacgacatcttagtgccgagcccggaggcggacaacggcccgaatcgtcacgtgtcaccgtaatcgcgtgaacgatcatccttgaactattatccacactatctcgagtttaaactgacactaattagttataaaacgactataattttattacttaatagaaataaagttttgaaacctgtaattacctattttaactattaagttaattgtaagagttacgattctgacatcgaggtcatgaagcgtgcgatcgaaacctccgtacctcgagagtttcattacccattttatcacggacgtccacggcacgtatcttgcgccgggtttcattacccattttatcgcgagttaatcgtgaggctcagtgtgagttctcggatgaagactgagagatcgttgaagactttttcgtttcattacccgtattattgcgggttaattgcgagactagacctatgtgctctgttataacccatgcgtcggtggtcgtcatgttaccccgtttcattacccgtattattgcgggttaattgcgagggcgggcggttctcccggaggatcaccctttacactccgaaaccaccgaggggattccccatccctggcccaccaaaaccagcacatcagttttatttaaagattatcccgattccgctgaacacttgatcatactaaaatccaacactaattcgtttccatttagtcgaaagcttaatatacaacattggtaataccgaaaatcatagtttcttctgatgagtaattaataagttaacttaatgaagtaataattacatagtgttgatgaaccgctttgatacctcgtgagaatcacaattctttgctaacggttagaatcgttatcccttcgaagcgaagtaaggtgcaggattcgcactattaaagtgcactagttgggctatagccaaagtctaagcgatatcagtaagtatgagtaaatagagtaatactcaatactcaagcgccccagaaccaccacctcctacggggaaggaccagcctttccatccggttaattaactcgataaaaagtgagtatgatgtagtattataatcatcacgtatttataacaccaatctcaccacaggcccgcgacccgacttccgagtcgtcgaccttcatccccgattagcgcccgccgttgccgttcaaccttcgggtaggagggtgatccgaccgaggtgagcgcgtcttcgggcctcacgctctcgacgtcgagaaggggcgtcgccgaagcggctggagatagtagcgggggacgggtaaagatcgaggtggcggaagcgatcggcgtgtcacacgcgggctctgcacctcggcgggatcacgggcggtaccaggaccgggaaccctcgcttgccgcccttctcagggggtttctcgggcggctgttccggcgggctctccggtgggttgctcggcggtgtccgaccctgcccatcccgtcgccctcgctccttcacggtgaacgacagccgctccctgtactcaccgtacggcccctcgtacctcacgatcagggtgtaatcgccgggttcctccggcgcccggaacctgaacatcaccaggccaccgtcgacgtatcccccgggtagtagttccaccgcacccaggtcggtgaccgacccacgttcgtccttcaactcgaacctcaggacgccctcctccggccaacagtcccacggccactcgtccgcacaccaaggcccccaccagtacagccgcggtcggacgagcaccgtcacctcggaaccggcctctacgggatcgggcgtcagcgagatatcgaagattaccctcttctgcctgatctcgaccaccatgaccacgggtacgtacgggaacccgaacctctcgacgacccgcggccactccgaccgtactacctcggcgcgtttccgctcgtactcctcgtacgacatcttccgcgggtcgataccgacgacgtcgatggtgacgacgtctcccagcgccagcatcaggtggtccatgacgtggacctcgtacgacgtccagggggcgccttcagggacgtgggtgaagacgccgtccggccacacgaagagctcgaccttgacgctcagcgtcctgagggcgcagtccagacaccacgcggccgggtacggctgtaccgggacgggccactcgacggctccgatatcgtacaggtacttcagcttcactccataggggaacgatatgccctcaccgttccagacgggttctaccatctggaggtccggcacccggtgcacggctggtatcctgagctccaggaccagggcggagtcgtgggcctcgggcgtcacccggaagtcgagctgggtccacttccaggtctcatctaggaactcccacgtgacctccgagccgtccgcgggttctacccgctcccattccttccagatgatgtacatccactcctctgccggcggtacttcttccgcctcaccccactcgatctccgggtagaacctcgcctcgaggacctccgcgtccggcggcaggagcacgtgcaacgtcaccggcttcccggggttcctggtactgatcgccgcgatgtactccgcgtccacgtaatcgaggaccttatcgccgtgccacgtagtctcttccttccagtggacgtcctcgacgatcagccagctcttcacgctgacgtccgggagcacctccgggtccacccagacggcaccgtgacccggtagcggtagtaggatgagggcgaccggaagcaccgtcgatgggaaggcccgcctcatgcccaagccccgggcggtgggcgtaccggggaggtatgaaaatatttttcgtacaggtaatagcgcgggtgttctcggacgtgggtcgtcccgcacgggatgctccgatccgagccggtatccggggttcgtcaccgtccaggggttaggcgacccgcagctgttttccactgagtcaaccgaccgacgggaggccgctgaaaccgagcctcggaacggttacggtttcctcatcaacggaactggttttgagaaatcgagggtgtgtcgcgcgtcgttaacactccgatgggattactacccttataactcgggacggccaccttggtgtccctatgccggtgggggtgacccggtggagcgggtggccctggcggggctcctccacgatgtcgggaagctcccgcagcgctccggggagcgcgggagccaccagaagctgggcgcggagctgcttaaaaaggccttcggcggtcgggagcgggaggacgagacgctgggcctcgcggtcctggcggcacggtaccaccactccgactcgctcggggacgctcggccgagtgacctggaggtcccggaagactggggcctggagctggcggtcgtggccctggccgacaccctggcgagcgcggagcgcgggaacaacgagctcgaccgggaggaaccccgtggcgatcaccgcgggtactggaccctgtacaacccttggtaccggatctgggaggccttccggaggcgactgggcggcgaggtcccgggcggctggggctggaccgaggggcgtccggagttcgtcccggacgagctcccgctcctgcacctcaacgtcgacccccgggagttcgagcccccgaaggtcgtggaggagggtgagggttaccgggggcgctaccgcgggctggccgggaggttgaccgagtggttgaaagggctcggtgtccgggaccatccgcacccgttcgacccggcccgggtggcgatggaggtcacgacgtcgctcgtcccggcccagcactacatccccgagggccgcgaccacatgcgctcgatcacgctctacgaccactcgctcctcaccgcgtccctggcctcgtgcctgtggtacctggtcgaggagggtcacctcgacggcccggaggataacccgtcggaggcttaccaccggttgagggacgggttgagggagggccggggctccttcctcctggtgcgcgggtcgctctccggtatcggcgagttcatccgctcggtccggcgcgcgtccccgctcgaggagaggaggcgtacggcctcgtacctcaagatcatccggggacgctcggccttcgtggacctgctcacggcgggcgcggcctggaccgtcctccgcgagaccctgggtcgggacgcgcaccccgcgttcctgctccgggcggcgggtggctccttcacgctcctcctgccgaacaccgaggaggtccgggaggcgctcgaagcggttcgggaaggattgaagcggtcggtgtcggagggcagcgacggggtcctctccctcgggctggcctgggtcgagctggactgggacgccctgatgaggagggagcggttcagggagcgcgtggaggagctgggtcgccgggagtcggaggaccggcgtcgcgcggtcctgccgggtcgggggacgacgtcccgggtcgaggagccctgccccgtctgcgggagcccggtcccggaggatgaggggtgcgagcactgcgagcggctgggggacctgggcgactccctggtccgccgggacgaggaggaccgcccggtgttcgcgggtttcctggtctacgaggatcgggacggttccggggacggtggggatgtcgtgcacgaacgcgacgggcaccggtaccgcgtgcaccacgtgacccgcgaagggttgggcggtgccgtctcggtaggtggactgctcctggtggatccggcgcacgtggaggaggcgctgaagtgtgcgcggaaggcggcaaaggaggggaagtctccggcccgggtcgtcatgtcctacttcccgtggtacgcggctacgaaggacgacgtgccggagtcggagggagaggaggggatcgcgacgttctcggggatggcggaacgctccccgggcgcgtccctgctggggttcgcgtacgtggacgtggacaacctgggcgagtgggtgagggaggccgcgggcgacgcgttcggcgtactgctttcgatctccaggttcacggacctggtcttccgccactgggtgaacgcgctggggttccggacggtcgcggagttgctggacgacgtgccgggactcgaggtgaggctggcggacggcgggcgggagctcgacccgccggagctgctaccgaggttcggggaggacggggagcccgagccggagcacggggaggaccgcggtcggccgttcctgttagtgtactcgggcggcgacgacctattagtggcgggcgcgtggaacgaggcgtactcgctgccgttcgaggtcttcctgctcttctcgcacgtcacgggttacctgcccgtcgcgtccctgtccggggcggtcgtgctcacgcggaagaaggccccgttccacctggtcctgcgggcgctcaaggcgcgggagcgggaggctaagcgcgcgggtgagggcgacgaccccgtgcgggtgaggctggcgccgaagggttacgtttcgctgttgaggttatccgtttctaaatcattgaatgtcaaagaattggaatcggatagcgaaaaccaggatacacatcccgtccccggacccgtgcggttcgacctggccctcgccgcggtggacatgttgaaggacgtcgtgggcgcgctcgaccggaaggcgcgggcctaccggctgctccgcgcgctccggtcctggtgggggcgcggcgacgtgggagctgcctcggcgctcgcgtacgtcgtctccaggatggaagacgactcgggggtcgacctctccgggacgctcctctcggtcctgccggttaagcctcccgaggacgccgagctgtacccggtcggcctgttcgacgtggccctgatcccgcacctgatcgcgaggaggggaggatgagatgggcgcggatctgaggccggcggagctcgcggaagagtacctgtacaagccgggtcgactggacaggaaccgtagggaggacgcggagcggaggtttgagaggttgctgaacgacttcaaggctaagaggatacagctgaagccctcggacgacgggctcctagagctcgcgttcttcacggcactggtgtcgttgaatgtctcgaactcgcagctcaggcggctgtacgccgagatcacgaacgtccgcaacgagaccaggagggccagggaggggaaagggagctgggaggacgtggtagccgccctgggcaaggcccgcgtcgtgctcgcgtacacgaagggtcggcaggggaaggagttcgagggcctgtacgaggtcctggacgaggcgctgcgtaaggcgacgaagatcgttgaggactcggaggacgacgacgtccggaggcgcgcgatcgaggcccttcacttcctggccgagggcatcgtcgcgttccaccgcttcctgggcggtaggagctgaggggggtcgaacgtggtcggtatcggcggcacgatcacgctggtcggcgagatccggctgaggacgggcacgcggatcggcacgtccgaggaggagatcgagatcggcgggctcgacaaccccgtgatcagggacccggtgagcggatacccgtacgtcccgggctcctcgctgaaggggcgcgcccgggcgctgttcgagctcgcgtggatgaagagccgggaaatcgagccggacgtgttcttcggcgcccaccacaacgagcgccacgagtgcgggttcgtgcggcgggaggtgtacgaggaggctaaagagtacctgcgcgaggatccgccgtggctggagaacgggacgtgtccggtctgccggatcttcgggtcggcgggcgacgggatcgggttctcggacccggggaggctggaggacgagcgccggggactcgggtacgatccctacgggcggtaccgggaccccaacgacgcccaggagctctccggggtcgtggacgtgaagaaggaagcgcgcgtggccttcagggacgcccacccgactacctacaccgttaatgacgtcttcgagcgggcgggcgagcccacggaagtcaagcacgagaacgcgatcaaccgcgtcagcggtgaggccaacccgcgctcgatggagcgcgtcccgaaaggttcgcgcttcggtctggaggtcgtctaccgggtcgaggacggggaggagctcgagtcggacctgaagtacctgatgtcctcgttgaagctcgtggaggaccaagggatcggccacagcacctcccggggctacggccgcgtcgagttcaggatcgccgccctctgcgcgcggtcgaccgggtggtacctggacccgggcgcgggcgaggggttcccggaggaggaagacaaggacgaggccgccgacgaggtcacgtacctgagtgacctcgaggccgagcggtacgagatcgtgatccgcgcccgggacctggaggaccgggcgtacctgcgtcccgaggagtgggtggagcggctggacgaggtggtcggcgagctcccgtggggccgatgacgtggagctggtcctggagctgtcgctgggtcggttccgcgcgggggacgctatcgagcggacccggacctccgtccccgcccagacgctcttcggggcgatcctcggggcgaccctggagctcctacgcggcgacggcgaggacccggacgtcgtaaaggaagtcctagacgcgctggtcggcggcctcgagctcacggacgcgttcccgctggaccgcgggggcgagccgctgctccccgtacccgagcacgtccgccgggagctctcggacccagagcgatacggggaggtgctgagggagctcgcgggtgacgacgtagacacggggacccacgggctggtgaccgagccggagcgcctgccgctgtccctgttcacggatctctgcgtcgaggggtcgccgacggatccggcgacgctgaagcggctgcgggagtggctctcgggggagcacgacccggtcgtgggctccggccggctcacccacgcctcggtccccaggacgggcgatgacacgacgccgttcaccctggactacgccagcggccgcgggatcgagggtcccacgcacgtggccttcctcaggtacgatgggaaggaaccggactactacgacgtcgaggcgctgctccgcgcggtcctccgttatctcagggacgcggggctcggcggtgccaggtcccggggcgcgggtgaggtcttagaggcggggctcagggagccggaaggcgaggagaagctgctgttctcgcagcggatgagggtcgaggagggcgagcccgcgatcacgctctcggcctgcgcacccgagggggacgcggagttctacggccgggtcgagcggaggggcctccactacgcccgggtgggtcctttcgtgacgaattaccgggtcccgcgccactacctggccgcgacgggttcgtacttcccggagtggcccggcgcggagaacctcaggttcgaggtcccggaggggctgctccccgggttcctccggggcgacccgatgtaccggggcgggtacgagctcgtcgtctacggtcgagggttcccggtccgggtcagggcgttgggggacggggattgaccgtcctgctggtccggaacgtgggcgtgaacgacgtccgggtggacggcgaacgggtgaacgagccgtactacgtgctcaaggagctggtcgagtcgggcgacctcgacggcgtgtccttcccgatcctagaacgggtgctggaggagctggagcccgaccggatcgtcctcttcgcgacggaccaggatccgggatcgaccccgaggcatctgaaggccaaggacacgctgtacgtcgcggaggctatgcgcgagctcctcgacgtcgaggtcgaggtccgggtgatccgcgagaacccgtcggaccacgacgcgatgctggagctctacggccgggaactccccgaggtcctggacggggccgaggaggtgtacctggacgtgacgacgggtacgcccgcccagtcgctggccctcgcgctcaagggtctcgaggtcgagccggacgcggagctcgtgtacgtgtccgaatccaccgggactacccggatccgcgtgggcgacgagctgctccggcggatcgcggacgagctcctggagtacgggctgaacgacccggccgccagggtcctgtcccacaccgggctggacgacctccgtacctacgccgaggcgcgggcggccgaggaccggttcgagttcgagcgggctcgggagctctaccgggggctccccgaggacttcctggacgtctcggatcgactggagcgcgtggagcgggcgctctcggacgatcccgtggagagaatggccgagcgcacccgttacgtcctggaccgggcgctgacgcacctgaagcgtggcgagtacggtgagtacgtcctccggacctgcgtcgcccaggagatgatcctgtggacgaccttctccgcggtctccggtcgcgagcctgacccggacgagttcgtgcggcacgcgtcgcgggaggcggactgggatcccaagtacggtaacctcggggacttgatccgcagggatccggtgagcaccctagctcgctacctcggggactacctggaggacctcacctcgctcgaggtcaccgacgcgggtcgggcggccgccgtgaacgccctggccagctactacgtggttaaggggctcagggagctccgggacgactacgcgcaccgggcgatcaggatcacgctcgaggatgtccgggaggccctcggacgctcgcgcgtggactcggagtactgggagaggaagcacggtcacggccccgacttcaagttcccgtcggaggaggacgacccggaggcggccgtcgaggccctccgggagtgcgtggacgcgatcgagcgggcggtgggtcgatgagcgggctcgaaaccgtcgaagtccggctggaggtgctcacgccgctccacgtcggcgttccccgggaggaagagttggtccgcgggctcgactatcgggtggacggaaaccgaatcctcgtagtggacttcacgaccctgcctccggagcgggccgagcgcgtgctcggggctctggagggcggggaccacgcggaggccgaaggatacctcgaaggcgccgaggtgctcagggaggtggagctgaggacggggggcgtcccggaccggttcctcccgacgtaccgaccgacgcgggtggacgacccgtggatcccgggcacgtcggtcaagggggcgctgaggaccgggctcctcctggccgccctgaagcgtctggacgggctgggtaccgacctgagcacgctcaccgatagactaccgcgcaacccgaagaaagccgccgtggccctcgataacaggctccgggctaccgtcttccagggtgggacggcgagaaggagctaccgccgtaagccgaaccgcgggtggccggaggttttcccccacgcggacgtgctgcgggcgctgaaggtggaggacgctaggcccgtcgggaagatacggaccgcggtgtaccgggcggagctgcacccgaagggtagaccgctcgacgcccgcgagttcgtggtctccgggactttcgagctcgagctcggcacggaccatggcgagctgaagcgcgtactcgacacgtgggacagggtggaactgccccggctgcccaagcccgtgttccgtttcctccgcgatgtcaggagcgggctacgggacttctgggaggagacgctggagaaccccgagacggtcctcgagcgcgcccgggagggctggcgtgagggtctaagggcgctgagcgaacggttccgggtcgacgtgcccgacgacgcggacgtccagctggggtggggaggcggccggctcgtgaagaccgcgctcccgctggcgggtcgggtcctgcggggtccgctcgatcagttcgcaccccagacggttaagctcgtggacggcgaggtccccgggctggtcagggtcgtggagggcgggtgacgcgggccgccgtgatcacacccgacccggggtaacttattttccgtcacgttgtgtgcccgatgacgaccatcgtcgggcggcggggaaaccggcccatgagtcgcccgcgcccgggatcccgcggctggatgctgatgtccgagggcgtcttcgcgctgatcgtgatcttgttgaccttcacggcgacggtaggttcgatccacttcaaacacacccatcccaggaagcaaaacaggctcacccgcctgtcgcacgccaggtgcatcgtggtcgtgacggaggacctatgcggcgggtccaggtactcggtccggctcgccgagatgctcaggaggagaggtgtaccgatgacgttcgccgtcccggcctgggaggcctacgcctaccccgaccggatgaggaagctgcgcgagctgggaggggacctcatcaaccacgccaacgacggcggagcgtcgtacgcgttcctgggtcgcccgggcaaggtggcggggttaccggtgaagacgcagcgccagatcatccacacgacccagaagtggatccacagggccaccggcgtacgaccggacgcgttcagggcgcccggcctggcgatcgacgagaacacgtaccgggccctggtggaggagggcatctgggtggattcgagtaagatctacaccaggcccggcacccgggggggcgcccaggtggatcgcgatcgacggccaccggatcctcgaggtacccatagcgtgctacgcggagtggcggtacgagcgcgggcagccggtggagccggagttcctgtgctcgttcgccgacgacctgttcgtgcgtcccaagatagcgaccggtcacccccgaggaggcgctggagaacctgaagcgcgggttcgaccagtactaccggcacggccggcccggcaggcccacggtgttcgtcgtgctcttccacgagcacatcacggccaacccgaagtactggtggatcatcctcgagttcgtcgactacgcgcggtcccatcccggagtggcgttcgcgacgatcgacgagttcgccgagttggcgcgtcacgggcagcggttcaccgcgttttgatcgccggacgcccaccgcgcgtccgggtcgtcgatagcgtgtgtcgtcgtgcgggaagccgtcgctcactctcaaaacgttaacataccgtgatcgcccgtgtcgttccgtatcgaagctcgacggtttccggttctccgcgggggtgcgtaccttccccccgccgtcgagttgaagggtgtgaccgtccgcttcgagggcttgacggcgctgcgggacgtcgatttatccgtcgaggaggagtgtgggagttcctcgcgggcaagtacctggccacgtgtcgcctactcgcgcgtggccttcgggatgcggtacttcccctcggctgagggctggggcttcgtactgctggggaccgtcgcctcggcgagcgtcggggccctggtggcgctgctatgccgggaggagaagtccgccagcgccgtgctcaacgccgtcgcctccccggcgatgttcctgggggcggtcgtggtcccggagaacctggtgccgagggtcgcgttcgagatcttccaccggtacccacccgtgacgttcatccacgcgctccgggcgacggacctgtacggtaagccggtagcggtcgcggacgtggtcgtggggacggtcctcaccgcgacggtcttcgcggcctcggccctggtgttccggagggcggcgagggagctgaggtgtcgtaattcgggactataattcgagctcttcccccaccccggggcgctcgcactcgatcccccaccgctcgaagtgtctcgcgtcgctcggtcggaagtagtgacatcctaccacccgtcccacccccagctccccgagcacctccgccacctgccggatccgcgccgcccccgggtaccggcagaaccccgcaatcacggtctcgacttcccaccgctcgcacacccaccgcaccagttcgaccaactccccgggctcccgggccgccagcagcacctcctccgactcgagcagcagacccacgttgttcggccgctccaccgcgagcacgcccgacactacctcctccctgttccgtacgcggttcacccggcgcacgtcgagctcggaggacggggacgcgaacacggtgatccccgggttcccgtccaggaggcccgggagcccgccgacgtggtcgtcgtggtcgtgcgacacgatcaccagctcgacgtcgcgcggttccaccccggcttcctggagattgtgcaacaggatcctgtccctgccgcccgcgtcgaacagcaggcggcgaccctccagctccaccaggcaggagaacccccacgacggtctgaagcccctcctcccgcgccggtcgtcgtagaccaacaccacccgcacccgacgcctcacccccaggagcgggagggtccgccgttccacgcccgcgtcccgatagacgatctaggaggatgccctcgggcgcacacccctccggcccgcgctacgtggacgtgtcaatcgagggcgcggggctccggagacgcgagcgtgctagtctacgggtggcgcgtggtcgacgtcggcggcctggaaccctccacgctcctcacctggatcgccacctacggcggtccccgcggccgctgcacgttcgtgttctgcctttccctcggggccgagaccccgtgggtgcccccgtacccggatgtcaccctcgacggcctgctggggacttccacgtccctcctgacggccctgctcacccgggccctcggggtgcccccggacgtcttcaaccgaccggtgctcgccccgaggctgcccgagcggtacgcgctcgtcggtctggcggcctgtctcacggccctgaccacccgccactacctgggtccgctcatctacgcgaccctcggcgtgttcgtgcccgaggggtgttcctcaccggcgttccgctcgccctctgggggctccgcctgatcgccgcgggcacgggactgccgctccccctcgtcggcgccctcgcctggctcttccagtgggtcttcgacgagaacgaggagcccgacgtcgtcccgcccagttactgggtcctaccgcgagtcgtcctctcgaagccgccgacctggtacctggaacgcgcgctcgagtccccggacacgctcctggactacctcctcacgggcgcggtcgtcgtcagcctaccgctgcccctcacccagctcgtctgggtcctcctcggcggacccaccggcgtgctcgagatcctcgactacctggtccagctgatcggggagatcatggaggaccccggccgcaccttacccgaggtgatcctttggttcctgctcccggtactaccccacgtcgtccacgtcccgacgtggctcgcagcgttgggagggttacccgcgctcctagcccacgcgggcggtctcctgctggccccgcacttcctcacccacgcgcccgcggtcaccttcggggcgaccgtcacggtctcgagaggcggatcgtgtccgaccggcgtccggaacgtgtccgcgtcgggcccgtctccgtgacagcttccatgtcgctcgggatctcacgacgggtgtagctccgacgggagaagtggagtgaacgagtcggtcagtgtccccgcggtggacgtaccgatcgccccgacggtcgagcccacgcaccggccggcacggcctttaacgcgcgtcggggttcgaaccctttatattatctttactcagacataaccctccagcttaaaccactcccagacctcaaaccaccaactgtcaacacaacctcaccaactcgaggataccgtgagtgggggtgggagcgcgtgatcgagaaggtgttggcggatctcaacagggtggcgggcgtcaacggctcgatggtggcctccagcgacgggttggtggtggcggaggcggtaccgcccgaggtggatcccgagatcgtgggggccatcgccaccacggtgtacggttcgggggagcgcgtcatcgaggagatggagctcggggagctgaagcagatgctggtggaatccaccgacgggaaggtggtcatcatcagggtcgacgacgatgccctgctggtgctcatcgcggacccggacgcgaacctcggactcatcaggctgaaagcgcgagaggctgccgaggagatatccaagcagctctgaacgcgggtacgcggcgttcgacctccccacgccccgaccggctccttccttcccgcggaacgggcgtctaccgggtgcgaggaaatctgtccgcccggagtccggcggagctcacgtcatacggagtgggttactacggctccactgtaacgtgagaacgggtgctgaaaccattgcgataaagcccatgaactctaaggaagtttttcctatctacccacaattcaacgcgtagaaagcggtataaagcgtggattatgttatatatagtgtccatcaggatcattggggttaggttgtgagggggttagattgtctatttaacagtttgctgatggatgtcctgatgaacgtcgctcacgcgtccgtgattacggcgctccaacggcagtgacgaccgatgacgcgtcggtcgacgtgtcattccccgggcgtggacccgtcctgcatgaaataagaatgaacgaacacgtgggtatctcattgctgaaccctatttctgggactttatcgacgtttcgtttaactcccacggggtgagccgggcggtgatccgacacagaccggcggggacgatcggcgtcggaccgcccaccgtccgcgacccggttgacgatcggcggtgatttacgttccgctgagtagagcgacccggtcggtccaccggaggcgccgcaccaccgccctgagtgaccgtgggggagcacccccgttggtcgagcccatccgctccctcccgggatcccgcactcgggtgaagctcacccgggagtgtatcgtcatccgcgagcgcggtgagacccgtcggatccgcctcgaggacgtcgtaggagtcaaggaacacccgaggagggcgtcgaaggcgctggacccggccgaggatacgcggctcgtcctgatcaccggggacctcgagaggctcgtgctactggtccgcgacgggcgattgtactggggcctcaaggcgctcctcgccgccagggacggcgagaccgaccggttgatcaggtacctaacggagctgctgcggatcgcggggcatccgccgctcctcgagcgtcgggacgggcgcgtgctcctccggtggccgtggctggagttggagctggggtcacccgagcgggccgagaccgtctaccgcgagctgctctccaggtgggaagaactgttggaatccgacgagaagggtcacgacctggaccgggaggcccgtccggtgtgggtggccctctccgtgccgctggcgcccatggtgatgacggtgggcgtccatcggcgactgatcgcccaggtcagccccgtgctgatatggggagcgaagctcgcggtggacgtcctcgagcgcgtgctcgggaaggggcccatccagtgctctgtggcgtgggagtcggtctgatctccgtggtgccctggctcgcgttgttcgccttcccgtactggtacctggcgcgccacgcgctcccctacgtggatgggccactgaggttcgagctgacgcggaggctcgggacgatgggtgcggtcacggggctctggtgtctcctggcaccgctcgtcgtggggatgtacgcgcccgccgtcgcgataccagcggcggcggtgtccatcgtgccggcggtcagggccgtgatggcgtgtctgcgcgccccctcggagttcaccatcgccctgatgaacgtggggacgtgggcgcgacggacgtccgccgcgggtgcgtgcgtcgcgctggtcgcgaccgcgctggcgggtccggtggtgggtggcctcgcggagctggcctcggccgttgcgtgcgcgtacgtcgtctcgagcagggtggggatcgcctctcacctggctaagagggtctggataccgaccgacaggtgttccgggcagcgaccggcgaagggatagtgcgggcgcgtttccgcgctctctccccctggggaagggggtgcgggtcggtgacgcgggttccccgttcgggcgggcctcatccccgatcccgacgtccgctctcgagccgctggacgtgcagcgggtcgatccggttgaagaactccttcaggagcgcgacctcggcggcggtcagcctgaacccggtccactcccaggaaccgtcctcccgttcaccgtaccgcacgaacacgccaccgtccggatcgtagcggaggatcagggctcgggccttaccctcctgatcgcggaagatgggcacctcggtggactccacgacacccactccccgggacaccgatcccgaccacgccatatggtttggggtgtccccctcttaacccaccacgtcctcgaacctcagatcgaggtcgtcctcggacgctatcgtctcgtaggcgatcttcggtcccgggatcttgccctcggcgcaccactgggagtagttgttcatcagcgcgttcacccacgcgtgcacgaggcactcgacgtcatcctccggggcttccaggtcgcagagggcgtagtactcccggaccacgtcggcgacggcctccggaccgccgaacgcaatcacggtgtccgcgaacctgttgatcttgtcctggacgtaggccatcgcgatcttccgggcgagtccggcacccgccccgatcgggaaccgtttagccgcctccaggagagccgccgcgaacgcctcgcggagctcgcggaggtaccccctgaagatctcctcggcaaactcgccggaaacgaacggtccctccgcggcgcatccggccaggtgcacggcctggacgtcccaggagatccgctcgtacagcgcctcgacggcgcggggatccacggcgccgctgaggacccgatcccggatgtcgccacctaccccaccgatgtactgcatacggcccaggaaccggatcagatccacctcggggaacgccgggacggcgcgccccgcgaacaggaaccggcggttgtgcctgaccgtacgtagctccccgtgcgccaccacctccagcctgaagtcgaggacctcgaggacgagcttccggacctccggcgagccgatggaatcgcactcgtcccatccgacgaacccggcggggtagtgcagcacgacgcccggacggtcggtgcgctcgtcccacaccatcgcctctcgggtcacgccctccccggacaccacggcgacgctgaaggcgtcgaggaacgtggtcttgcccgcccccggcccgtcgacgaagcacatgtgtccacggaggttcagggccaggccgacggcgcggacagggtcgaagaagaaccccaacgcctcgacgaccttcctcaggtcggcgtccggacagaggtcacggtccaccgccacgaccccgtttcaacgtgttcgtcgtccgtagagacgtgcgacgagtcaccgtgggtgctggggtaccgtgtcgaaaagtggatgaggtcgggggcaggatatcaccgtttccgggtaaggccgccggcccttgaaacccgccggcgatgggaactgaactctcgtgtcggcgatgggtcccgacggctccgtaggagcgtcatcctcaacccgggttctagagcggtagactcccctgcgccaccgtcagcgcacccaggaggaagatcacgcagtagccgaccagtcgggtcacaggcttcagcgcctcgcgaagcggggagggtaacgagtcgaccacgagctcgcccaggaagttcgcgacgacggtcaacggcgagcccgtgtcgcccccgaaggcggtagacacccagtagaggagcagcggcgtgagtagcagcccgaccagtacctccagcggctttggtctccgatcccaacccctccgcggttcgaacttccggaaccccttcaggtcctcgaactcctccaccacgagccactcgaagccgccggcctccttccggtcgtagtagctcgaaccgagcaccgtcccaccgccgacgacgggtatcaccagcttgccgtttttcatcggtacgatcgcacggatcaccaggagtcgatcgggcgatacgtcgacgcggaccaccctgtactcgacggttccgatgtcgggtacgttcatctcaccctcccgaaccactcgatactggaccggctggaatcccggcgcgagtacgcccgtgtacgcgtcccggtacgcgtccctcgggaccgtcccgtacttgagaattttcgagcccgcgggcagggggatctcgggtaccgtcgcgaccacgtccacgaggacctcgtccccgcgcaccgacctcacgatcaccgtctccggaccctcggagagacgtcggagctccttctcccacagctgctccgtgttcaggcgcgttccccacgacccctcgacgttcaggagcagcaggaacaggtcggggtgcagggagcgcagcaactcggagttggcgtacgaggcgtaccaccgatcgcccgcccggaccagcgccgggatcggatcaccgaaggggtggaggagcaggctcgacgtgacgcccagcggtaggtaccgccaccccgccggtactagcaggtccaggtacaggaacgagtcgtcgtccgcccgcacgcgcagcgccaggaccccgtcgagcaggggcttcatcgcccgaccgagccgggactcgaggaagaggtcgcgtcgcgtgcggaactcctcgtcccaccaggttatcacgctgacctcctccggcagctcgaaggtcgtctcggccgtctccggggccggcgagtggttccgctcgcaccacgccctcacgtcgcccgcggtggccgagctgaggacggcgtccgcgggcacgaccgccgccgtctcgatccgggcctcccgcggcacgtagacggtgccctcggtgcccggccagagccgtacgaacacgtggacctcgtggaggttacccttcatcccaccgtccaacacggtgatctgggagacgaacacggggggcggcggtgaaggcgggaggatcctcgggttggcgtgcgcggccgccggcaggagcgcgatcgccgcgagcagcaccgcgagccgtcgacgcctcaccgggagtggaacgagggccgggaagaggtgataacggtacggtggaccttctctttcccatccccagtagttcaccttcaccggccagtactcgtactccctgaggtcttcgaggccgaaggcgacgagggccggctcgaaggtggggacgttgacgccctgctcgatgacgaacccgtaatccgtcggctcgaggtagtacgagtgtctgttgtcggactcgtacgtcgccgcgttgaactcgtaacccggaacgaggtacatgagcaggtggttgctgacgagccgcgcccgcacctcgacgacgagcagccccgggtcgacccgggcctccagtacggggatatcggcgtagccccgctccaggaggcccgcgaacgcgttcctcacggtctcgggtatcccgtcgatcggaacccggaccggccagtcgtcgccgacgggggcgtagagccggtcgcgccactcgagcccctccgaggtcagccgccagtcccggacctcgtggcgtccccattccgaccgcggtggcagggccagcccgtcgaccgtccggagctcgtccgcggcgaaccagtacactccccggacctcggagttcaggggcaggtagacccggacggtcccgggtttcgacacgtacaccaggtagaggatgtccgcgtggtcctcgtccggcggtccctcgaagaacacgtctaccgtgggggtcgcggccgcgggttgcgcggccaggagcagcgccaggagcgccagcacgggttgcccttcccccgcggcttgaaggtatccatacccacttaacgttaactcccgacccgttgacctcaattcgggaaaagataatgcttcgtgatcatgtttacggtttccgaaagagcgaaccggggcgcgaggggggagatcaggctcgggcccggcgcctcggtgggatcaccgggaccaccgggatcgggagcttgcacctcttgccgcgtccctccacgcggaacgtcgccgaggtcttcccgttaccgtacggaccctcgtactccacgaatagggtgtaataaccgggcttctccggcgcgcggaaccggaactccacccatccctcgaagccgcttccctcgggtaacttcacctcgcccagctccatgaccgacccgtgctcgtccctcagctcgaacctcaggacgccctcttccggtgcgtaggaccacggctccgggtacggccggacgaagacggtcaccgtggaacccgcgtccacgcgctccggtaccagcaggtcgaagctcacctccacccgttccacgccgatcaccgcgaccacgggcacgtacgggaacccgaacctctgggtgacctgcggccactccttctcgatgacctcctcacgctggtgcttccacttctcgtaatcctccgccggtgaaacgtcggcgagcacggccacccgagcctccgggaacaccagcatcaggtggtccgtgaggcgagcttgacaggtgtcccagcccggcgcggccgaggatttagtgacgacgccctccggccacgcgaagagctcgacacccacgtccaacgtctcggagccgctcctgacgtagaagctgttgtcgtagcccggctgcgccgggatcggccattcgatgacaccgtaggagtactccgatcgtaacgcatcgtcgtagtgcttcgggtagtacatccggaggttcggtacccggtgcagcgccgggatcctgagcttcaggaccagtagcgagtaggagaacggcttcccggggtcgtgctccggcgtcacctcgaagtcgagctgggtccacttccaggtctcatctaggaactcccacgtgacctcggtctgacccttgggtttcaccttcacgctctcgaacctcgacggatcgctcaggacctccgacggactccggtccgagaccttcgggtagaacctggcctcgagcacctccgtaccctgcggtaggagcacgtgcaccgtcaccggcttcccgggctccttggccttgataaccgccatgtacgtcgcgtccacgtagtcgaggaccttcacggtatcaccgtgctccgtggtcacctccttctcgtggacgtcctcgatgacgaggtggctctgcacgcccacgtccagcagcgcctccggatccgtccacgagtcaccgtgaacgggtaacggtagaaccaagacgacgatcgggacgatcgccggcgaaaggacacgtctcacgttctcacccccgaagtggatcgtcggaagctccgacactaaagttttcggtaactcatctccggggtcgtgggtcttccagcgtgatgtgtacccgggaatccgcgggtgccgccgtgggcacggtcccgtccccggcgtggtgcgccggcgctcccgcgttcctcccgcggggggcacggggggtggggactccccggtacccgcccaggactcccgggacgccctccgacggttccctgtccgcaaggtctatcctcggcatcgtcaccgtcccagttctcccggcgcggaccggtgggggcgcaatcgcgggtggacgggacgggcgtacgtcggtccctcgtgcgtgcggtcgcgttctcggtactgactacacactccggctcgttcctcaccccgtagagtagggtcgagagactcgccccgacactgtggggggaagggtcgaatggtggccggagcctccgagtggcggaagacgtgcgagggagtccggtcccgcgataggaagatcggtcctgttactcgcgatcccgctgctcttgatggtgtctcccgtctcgggtgtcactgtttacgttccggacgtcgtcgatggtgcgttctcgttggagaaggaggggttggagcacgctactccggtggtcacgagcgggcccgtcgaacgcttcaacacgttcgagaacatggtcgtcgattacgagtacgtatcggtttccgataatcacgacctcgtcgtttgcagtaacccgttcgacgagatcgacgtgaggatcaccccggagggaatccgcgtcgagtaccagacgtctcgtgggaccgtccgacgctcgctgtccttcaaccccgagcacacgtacctcgtactcggactccagggcctccgcacgatccccgtcgaaccccagcagggaggcggcgagttacccgtactcatcatccacgatcacagggtctacgagcccaccacgtacttcccatcccccatcctcgggcgctacgcccgggacgtcaccccactcgctcaggccgtcgaactcatgggaggctacgacctccttgtcaggctagaggtcgatggtagcaccgtggccttcgatctcgtgaaatccgacgggtagggcgcctaccgggtcgtctgcgatttgaacaccgggaaggcatggcgcgagtccctaccacccgaggaagctcggaagctcctcgacctggcccgggaggacctggctaagatccctcagttgaagtctggcgagctcgaggacgagtcgggactccggctggtcgtttacgacgtcaccgaggataaggtcctcctattgctcgcacgcccgtccctcgagttcatccgggggcataacccgagactcgcggaactcctgcacgtactcgagagcacagcggatagcctcctcgaatgggatatcttccagctttccgctcgggctcgggaggtgaaggatctcctcgagggtgctggactcgctagcacgggagcgatccggtacctcctacacccggaactcgccctcgggaccttcctcctcacgagcggtttcgggttcatcgccttcctaccctggatcgaactcctgaagcgcttcccgagactgggggaagcggagttccggtgggaaccttcggccctcctcgagtacgcgaggcgcctagcgtacgtgggagtgctctacggtgcggagctcgcttactggacgtgttgtgagatcgcggttaaggccctgctgcgcgtcctgggactctgggattacacggtgaacggtaggatcttcgacctcgcggactccgacgtctgggcgccgttgctcgaggagccaacgaagcggctcatgagcgagctttccgggttgccgcgaccgctcgtcggcgcctggtacgggctaatggaagctgtgactaagcgggaaatcgggcccggtggagtgaacgtgaggaacgcggtgctgagggtcgtcggtcacgccgtctgcgcgactttaccactcccgctcggcgcgctcctgcactccctgtgggctgacgagtgcgacttcggcgacaggttcctcgagtactggccgggagtactcgcccccgtgctcgccgtactcggagcactggcggagaacgcgctaacgggggtgtggtgacgggcgcccgccctccctcgaaggatagttacgattaccgtaacgatctcgagggcagaaaggtgacccgacaccaggcgggtctcgggagcctgtgcaggaccgggatcgcgagtcccccaccctccaggaccaggtgaccgccgacccggtccgtgtgccggaccctgaacccgaggagcacggcctccctggccaacctctcgagcgcgaccgggctcagaccctcgtacgccagcaccgcgcggagcaccagcgcaccctcgggggcatcccagcaccgcaccgtccccacccggtacgccgcccgctcgtaggagagggaccgcagggagtacccgtgcgtgggcggcgggtaccagcgcccgtcgtccccgcggacccagcccgccggggtccagagccccgagacctcccgggggccgtaatcgtaccggaggacggcccgcacgtgcgggagccggccgtacccggaaacccggagcgcctcccggttcagcccctccaccgtgtgcaggaagggtctcaggaggaccgcccgcgaggtccagtacgcgcgctccaggtacgggttctcgtcgaggtgggtcgcgtggaactcggccgggttcagcaggaacagcgcccaggtgacggccagggcgagcggcggcaggatcgcgtcccaggtgtcggacggcagccccgtgagcgagagcctgaccgagcgccacgagccgccctcccgcctccacatgaccggtacgcccatcgtcgtgaacgcgtcctcgaggcagtggaggaaccctcccaggggcacgagcgcggcgttcgggtgcccggtcgcccagaggaggtaggcgagcgcgccccacggccaggggcagtggaggatcccgcggtgcctgagcctccgggagagcgccagcctgaggtcccggcccgtgaggagctcgagcgggtagagggccgaggagaccagggagttcgggtggtcgaggtcgggtagtatcgccgagagggacgcggtgatcgcccgttccacgcccaggaacggggcggtcagcaggtaggtgagcaggacgtgggtccgggccctcatcgtctcaccccagcttggagacggcgaggccggcgagtccgagggccgtgagcgcccagaagtccacgctctcgtccacggtcgtccggaggatcaggagcccgatgcccgccacggcgagggcccggagcagcctggacgggtcctcgaccagcgtgaccgtgcggccgtcgtcgaacacggcctccacctccgcggagtccgtccccgccagctcgtccgtgaggtcctcgcactcgacggccgggaggtagccccggttgagcacgagcacgggtacgctcccggcgagtcgctcgagcgcacggcgggcgtggtggttcagctggaagtggttggaggcctggaagacgagcggcgcgtccacctcctccaggtaccggtccaccagcaccctgtagggcgaggtggaggagcgtccgagcgcgtcccggagcgcgtcgctgagcaggtcgtactcgggcacgccctcgacccgggcgctcgccacgtacgcgcccgggggtagctccctcacgatctcctcgatctcgcggggtaggggccaaggtgtcaagtggaacgcctcccgatctcatcactacggtccgaaaatccgcggggtgggcgccggagggactcacctccgacgcctccgggggacgatcaccgggaccggcggcacgacgtgcgatccggttccgcggccgtcggttcccgtcccgatcccggtggactcgtcggcgggacgttcaccgcggtactcggaggcgtgatggtccagcacctcctccaggtactggcggtccgcgtccaggtcgtcggcgacgtcgtcgggctcgcatcgaccgggcacgcactgcacggccgacagcagcagtaacgggaggagtagcgcgtgggggagcgatcaggccacccccgggttgtcgacgactttcgagagtacgtcgagtactcgggcgttggaggtcacgcgtaccaccttctccccgttcaccggacccgcgtcgaggatcgcgtacgctcgcccactcggtagagtaccccgttcgagtaccgtaccaccgctcacgtcgacgttagcctcgcccgtcgagtcgagcaccagcccgaggagtaccctacccgcccgacccttgagccgcacgtcggtcgcgagaccgccggggatgctctcgctcgcccagcggacccagagtcggctcgaaccgttcgagcccgagcggagggagagcttgacccgatccctcacctcgaacaccatcctcgcgggctgcttcaagtacacgctcacgagctccggctcgccctggagctcgaccgagactacaccctggtactcaccctccccctcgagactcttgggtactagacgatcaccctcgcgagcgaggtagcgcacgaggtagtctacaccgggcgcgggcacccagaaggagactttcttcccgtcgagaccgtagttcgcgggcctgagcacgctcacggtcaggctcacgggcacgggcgggtccgagagcaacaacctccgggtcacggtaaccttcccgggtgaacggtccgcggtcacgtcgaggtgcagggtgagcgagtccccgggtccgagcctggtgtaggggtaccggaagcctcccgcgtccgtccatacgaggtccgcgcgcacgaagcgagaatcccggaccgagaacggttccagctcgagcttctcaccctcgagtaccacgctcacgtcctggtctagggtgcgatcgccgaagtccaggtgcgtccagttcgagtaggttaaccgaaccatgaccgggtgctcggcctcgttcgacacgatgacggtcacatggtaagtgctcccctcccgggtaacgcgcctctccacgcgcacgggggttagtacctgggagagttcgggcgcgtactcgctcacgtcgaccacgctcacgcgcaggggcccacccgcgtaccgatcgcggagttccacccgagaacccgcgatcgaaccactcacgctcacgatcgcgagcttacccctcggcggcgagtagtacgcttgagcgagccattctccgctcgaagagggcgtgaaccggacgaccaccttccccgcgcccagggtcgggtccgcgggcacgtccgcggcctgggccggggtcgtcagtagcagcaatcccaagagggtcgggatcaacgtcgctcacccggacgggcgggtatcgctacggtggatcaacgcggcgatccccggggtttacatccgggaaattaggacgggaaaccgtagtcgcgtttcggaaaccgatgcgtcggaacggggagtcggcctcggtccgtgacgcaccccacgtcttctggggacgataccgtgcacgaggaaggagcgggaagaccgcccgacggcgtgttacggcgttgaatccgggccggccactaccttcgagggcagtgccggtctagccggtcgggtccggattccgtcggtcgaactccgccggtctctaggtgcccgtgagcccccgccgcagggcccggcggaccgtttccaacagtctatagggaagtcgaatcggcagtaacagaacgacgatcgtacggtccactatcgcgagcagcagctcctccaggtagatgatctcgtggaggtaggagaggatcccccataagatccgcttgatcaggcgcagcaacctcccccggggacgttcgacacgcgatcggtcttaactcttctcacggttgcggcggtgcgtccgccgtcactcccgaccgttcgccccggaggtcgtggacgatccgctcggggttccgttcctggagaggagtagcctcagtcgcgcacggtagaattccggagaaaccgactgaaaggggcaccctcaccctccggttcaggcccgtacctcccgggtgtcggttccggatattatgaaaccgtcatcatacaaacaaacacgaatcagtttcgagttatggtcggagtccccgtgcggggacgtggtgggggcgggacgcgggtcacctcaagcccggaaccactccctcgagaacgagttccaggcccggatctcgccggggcgtatctcctcgagcgcgggcaccttcccgcccgagaggagggccgtgccggcaccgagcacgcaccagtccctccccagcacgtccagctcgcgcgagacgatcgtgtcctccgggaccatgtcctcgagctcctcccgggcctcgccgacgtcctcccggtacacgccctcgacgtcgcaggacccgaacacccgtcggaccgagcgcacgaccggctcggggtccgtgctcgtgagcagtaccacgccgacgtcaccggcgatcgactcgagggcgacgctggccggggtcagctcgagacccagcagcctgtcgatccgtccctcgagcgattggagtacgacctcgaggagtgaccaggcctcgggcggtaccgtaccgtaggcctccaggtgcggtcctacggggtccgtgagtaggactcggaccaggaacatccgaaccacccgggtggggagggcgtccccggtactcgagccctaccattcacgtttgcgatgccgggaacaccgactccggtgccgtcgttacgggtccatgaccgcgggcgggcgccgtccggggtcgacgacgccggtggatcgatgtgggaaacgtatcagtttccttatcctacggaacgtccgccggatcggcctttcccggagtaaagcgacgttcgcggcctctccaccggccgatcgttcccgaaatctcttaatataatgagctcgctgttctagtgcggaatgatgcgggtcgggccggtgggttgttctcggcgttctcagaatcgttacgaaaatactaacgataggcgggccgatgcgagggcgtatcccgggacgagatccggagcgtgggggtgtttcgggggacgtctcgttcccgtgccccgggtactcgcggctcggaccgtccgaccaagggggatcgtcggcgggccggggcgcgataggagccgcgtggacggggcgctcggactgggtgacgttctcaggtcggcgctcccaacggcgtccagagcgcgacggcggtgagcacctgcaccagcctgtgtaccgagcccggaacgaccgcgggaggggacgtcaggatccgggtgttccgcagaccgtagagcagggcggcgagcggctgcggtagcgagctccagagcagggagaagacggatccgccgatcgccggtaggaggatcgtgaccgggaacgcgagccagtaaccgacgtcgagccaccggccccggtccttccagagcgtgtccagtagggcgtaggtgaaggcggcgatcaccggcgaaccgacgagctcggcgacccggtgcatcgcgaccgtgtccaccacgggggccaccgcgcagtagagggcgcgctccgagagctccttcacgtcctcgtccacgtcccactccgggacccggaggcccaccaccggtaggacgggtatcaccgccgatcggacgacgggcggcatcaggagcctcccgaggagctcctcgagcaggccgaccggaacgtagtaggcgacggccgcgaggaaccggccgagcggatcccggatccacggttcgacccggggttccaacgcgtcgtacagccggcgttcgagcgtcgtcagcgcgaggtcgagggggagcgcgcacaccgccgtgagcaggtccgggacgatcgcgagccacggttcccggaggacggcacacaacgtccccgccgtcgggtcgctcgggtccggtaggagctcgacgttcgggaacctccgcttccactcgaaccaccaggagaggagccgggacatcgacgtgttcacggggtcggtggctatgtcgatgccctcgtcgatgaaccgcctgagcgggtgatcctccggcagctcgaaggtgacgaggaccgggcgtgtaccctctagcgagtgcatgaccacccctccgactctcccgctcagccgctccacccgctcggcccgctcctcgatctccttgatcgcccgggggtcgctcaccacccgaccccagaactccggccgctccgcgctgaagtcgatcctcacggtgagctccacgacgtcctcgtcccggatcaggtagtagcgcagcgtgcatccccgcccggagagctcgaacgtcgcgtccgcccaacgcgtccggccgacgagggtcgagacccactccggggccaggtacgcgcggaccgagtcgccctcgaggacgtacacgaccggcccgaggtccgtgaccggcgcgacaaggtacgtgcggcccgcgtggtacacgaggtagctgctgaggtacttaccgacggagatcacggccgggtcggggagcttcggttggatcgcgtcccacggggacagccgggatgacgggccgaccacgaacgagccgtcctcgggccggtacgtgcaggtgtacgaccgcccggacgggttcacgtacaccgtcacgtgcgccccaccggtgagctcctggagcgcccgctcgcggcactcgtgcagcagctggtagtcgccgagtgcgcccccggtcaccgtcgtcgccgaggcgggagccaccgcgagcggtagcgcgaggaggactagcgccgcgagacgccggagcctccggcgtcccggtcggacgggtgcgaagggcgggagcggcgtccagacggagttccctccgctccgccgccaccagggttcgggcaggcggacgttggggtgctcgcgcagcacctcccggagctccgcctcgtccgcgttacgccaggccagtaccgcccggtcgaccgcctcgatgatcgggtcctcccaggggggctggaagcgtgcgaacaggggtagtgcgccggagggcgtcttgagcacgcccacctgaacggtcggactgtacgtcgacgcgaactgagccagacggtacaggagccggggatcccggctcacggtcctggagacgaggatgcgtccctcgcgcggcaggaacgtgatcgtgtacacgatgacgcggttcggtggtgacgacgggttgagactcttcggcaccggccggcccaggacccggaagaccactcgatccgggtagacggcgtactccacgacctcccgcagcatgtcctccatatccaacgtttccctggcgacttcgcgctctcccttccggatgaccgcctcgtagggcggcatctggccctcccgcaggatccggagctcgcagacggtgtcgtcgagcagcgccgcgaccaggtccggccaggcgtccacgaccgcgggcccgcgcacgtccagcgacgtcgactcccggaacccgtccgcggccgtcgacacctccacgcgtccgggtccgacactcacctcggaggtcccgcagaccacgaacacgtcccggtccgggaggtagaggacgtcgggtgccgacatgttctccgcgtccacgagcacgggcgggccgtccggggagtacgcgtccacccaccgctggaacacctcggagcgcacgtacttccagccgaaccaccagtcgtcggacgagctcccctggaggatgggctgacctgcgaccgggcccaccgtcagcaggatcagcgggatcgtcaccgcccacctggccaccacccggccgcccccgatctgcgttccgtaaaactaagtaaaactaaacaaaatggatttcgggcccggtggggcgccggtgcgggggaaggggatggtagcgacggtcccccgtcccggtcgccctcgcgctggtccagccctgtctgggagagccgaacgactggctagcgggtttggaggcgtcggtcggcctgcagacgccccctaacgtcacgttccgctgtgcctggaagggcgggtgcgactcccccgggaggaggtcctcacccgcgtactggacgccaacgccgtcgatctgtacgacgtcgagatgttgttcgacgcctcgtaccccgggggtaaggtacgtgcctattctgtgcttgagctgcatccgccccgagagggtgcgctgctccatccccagctgcgacctcgacgtcacgttctgggacccggggaggtccgaccccgggaagccctgatctggggatgggccgggaacgagcccgtggtccggctcctgaggcccgcggtccgcgtgatcgagcgggacggccgacgctcgatcgagtgcgcggtgaccggttccgcgtgggtcggtgagcgcgaggcgagggtggccctccgggccgaggtagaccccgcccaccccgctgcaggcgatcctcggggctcacggcgtcctcttggacccgacatccttccccacgatccgtcacgcgacccgggaccctccgcgtccgcatcctggtgtgctcccacgacggtcgcaagctggggtcgtacgagtgatccgcgagggccccgcggtggtccacccgttcggatcgaggtacctcgacgtgacggtcgacggcggggctcgggcgcggccgacctgctcgtccacaggtggtacgtgaccccggcgtcgcccgactggacgctcgaaccggcgacggacctcacgtggatcgccacgctcgacgaccggttcgggaggtggacgccgatcctggagctacgtctgaccgccgacccgatcctcccagttcacccgcggctagttcccgacggactgatcgacgtgcccctgggcgtgtcgtcggcctcatgaccgtctcgctcacccgggccctcgggatgccgtcggacgtcctccaccggccggtgttcgtcccgaggctaccaccggagtacgcgctcgtcggactggcggcctacctcacggccctcgccacccgccactacctcggaccgttggactacctggccttcagcgccctcgtccccgcggagggcttcttcgtggggtgccgctcgccctctgggggctccgtctgatcgccgcggacacggggctaccgctccccctcgtcggcgccctcgcctggctcctccagtgggccttcgacgagaacgagctgacgacgttcaacgtcccgcccaactactgagtcctaccgcgactcgtcctctcgagaccgccgacctggtacctggaacgcgcgctcgaggaccccgacacgttgctgaggtacgcgctcacggcgcggtcgtcgtcagcctaccgctgcccctggcccagatcgagtggatcctggccctgttcgggccgaggtacgacatcttcggcgcgctcgacaccctgctccgggtgctgaggaccctactcgcggtcccgtcgaacgcgtccgtcgtcctgtccgcgctgctcccgacgctcccgtacctcctcccggtcccgccgtggctcgagcgcgacgtcgacgggttccacctcgatccgctcctccgacagaccgtggtccccggtcagcctccccagagtcgccctcaggaagcgggtgctcgggtagtacctgcccctcatgatcggggaccccaggggatccccgggcggcgggtgaggtccacgggcacttatccgtgtcggcgtttcctacgtcccgtttgatgtttccgtctaggggtcgagcccagcccgcgggcgattggggcccgttcgtaagagtacaacgtgtgaggcgcgagaagttgacgtttcattgtctatgcgagctagcatcgagaggccccgtgggcgggaacaggattctggaaaatacacagtcgccttgaaggaacgtgtttcattacccgtgttattacgggttaattgcgagacttaggcgttgcacaaaacgtctgggacgagtacctcgcgcctggcgcagtcgggtttcattactcatattatttacccatattattacgggttaattgcgagttatagggcaggagcaccagcgggatcaccgatggctcggtacgtcattgagtttcattacccatattattgcgggttaattgcgagaacgtgtgttggaagagcatctgggacaacatagaggcagacttaaggtgcaggattagtttcattacccatattattgcgggttaattgcgagttttgcggagtaatcccatgttggttgtcggtgaccgtagagtgcgggatagagtttcattacccatattattgcgggttaattgcgagcccgcggacaaggcttcggtcttgtggagggtctattggagcagtagtttcattacccatattattgcgggttaattgcgaggggttgcagttacacggcgtatatcatggcgttcccagtggagtggtcagtgtttcattacccatattattgcgggttaattgcgagactcggtggacacagagctcgccgccgcgctatcggcactatgggaatcagtcgtttcattacccatattattgcgggttaattgcgaggtgtccggtttgcgactcttagggggataacgactttcacttccgcgtcctgtttcattacccatattattgcgggttaattgcgagccggcgcgttaggcctcagcaacgtggagaaagcgatactttatgacgatgtccttaaggagcgtttcattacccatattattgcgggttaattgcgagaagtatcacagccagggcacggacgagacagcgtactgagaggggccagagtagcaacaagtttcattacccatattattgcgggttaattgcgagggcgggcggttttcccggaggatcaccctttacactccgaaaccaccgaagagattccccacccctcacccgccagagccagtgtactggtcctatttaaagattaccccgattcctctgaacacttaatcatactaaaatccaatactaattcgtttccattcagtcgaaagcttaatatacaacattggtaataccgaagatcatagtttcttctgatgagtaattaataagttaacttgatgaagtaataattacatagtgcctgtagacagctttgataccacatgggaatcataattctttgctaacggttaggatcgttatctcttcgaagcgaagtaaagtgcagaatttgcactattaaagtgcattagttgggctgcagctaaagtctaggcgatatcagtaagtatgagtgagtagagtaatactcaatactaaagcgccccagaaccaccgtctcctacggagaaaaacccgcctttccatcacgttgattagccctgtaaaaaattagtacgacttaatattgcataaacacgttattagtcataccaaccgggccgactccgacgtgagaggacttaccgccgatgactccggatcctaccgttcggcccagtcccgtgggactggtaaccgtggagccggacggttcccccgggtcgggcccgctctcggctctatcctcaggttcctgaggttccgaggtgacgttctagggcctcaggacgtctccaaatcgccgccggtcggccgttcgagttaccaccgtcgtgtgggtccggatgccgggagttccggtgggggacgcggcctcggagggtgaccccctcgccggggtgatcctcgcgccccgtggctcgatggtcctcccgagctcagattgtatggccaatcgaagaaggtgggtcctccgccccggatggcaaggcttatatcctgaggtaccgctctacccctgactccatacaatttggaggcacatcgggggatcacgtgccggggttggtcggatcgcgtatcccgataccctcggaccccgtggaacggatccgggccctccgagtcctgagggaggtctaccgccgggggaagaagccgagcctggaggtgacctaccggaccgtcaacgggagcacgtgcggtccctattacgtcgcgaggtggaggtgtgactcgcggttcaaacacggtaggaccctctacttgggtaagccggaaaacgaaagcgtttccttcgtcgagtggttggtttcccttgatcggaacgaggttttgaaactcgcgcggcacttgatgcgcaatctccgctcggtactcaagaccctcctgaccgagatctcgaatctaccatacaaacgggcgcgacgagtactcgcccgcgggctcgcactgacattcgacgccagaccctcgaactcaccgcgaatccgggacgtgttagaggaactccccgaccggttggaatccttcctgatcaggaccctgggaggctggccggcgcattactcgagtcacttgaataagatcatccgttctagaaggaagtccctcgacgggaaacacgagatccccgacgtactcctagagctcgaacgctggaaactcgagtactgacacgcaccgccacgggatcgccaccgaccggacgcggcgtacgggggccgggggtccgtccgttggacgtgcgctcgctctacgggctcgcgttggacgtcaccacgctcgccgtgctcgagctcgtgaagcgttatccggcctcgggtgagaagctccccgaggataggaactcggtggagctggtgctgtgggaagtcaaggacctgttcaggcggttcgagctcgggaggttggtggacgaggaggagttcctggaggcctgcttcgaggtgctcaggctacccggcgtgcccgtgagggtcgggggagcgtgcgaggaggccggtctcgagaccctgcggaacgtgttcacggacccagacgcctctgtacttttcatcacctcgcgcgggctggacgtattcgaggacgtgatggacgggctcgggatggacccgaaggacgtccgggcggagtgtcggaggctcctcgtacgggacgacggtgcggtcggtgaggacgcgatcgagtcctgggtcgaggccgggttcgaggtccgggtgatcaccgacggggagagtcacctgaaggtctggttacacggacaacgtgatggcgatcacgggcgcgaacatgaccaacgtcagtcttgagaggctgagggagtgccgggagttcgtagcgcccgtcgtgatggacgtcaaggcgccggtggccctgctcgagtacgagccgctggggttcgcggcgatggtcggcgcgaacgcgcacgcggtcgtactccgcgagttcctcacggagcccgatcgggtgtacggtggttacctacccgagtgcgagggtctgaggcacctgtaccgggagttgagagcggggttggagtggtacctgcgcgagggttgtccggaaatgctctggtgggtggaacccgagcctcggacgcccgacctctgaacacatcgagcccgtggtcgaacgtcctccggccgctcggggaatgcacacgggccgggagtccgtggggtcgtatccccgtcccgaggactacccgtggacgcgccgtggaccaggatactaaacgtacctgtttctcttcacttagttctggtttcttgatctgtcaccgacaccggggcgacggttcgacgatgagtccggtgaccctctcgcacggtcgtccggtaccccgacgctcccgggatccccgcgggcgatacctccacgggtccgcggccgcggtcgtcaccccatcggggacctcacggcgagccccgcaccctggggcagcgcggatcgggcatgagccggcccgcgacgttccaggcgtaggcgttgcacccgccctggcactcctcgaacctcggacagtcccggcacggtccctcgggttcgagccccctcatgccttcgaactcgtcgaggtccgccagcgtgtacgtcttccagtgctgacacggcgtcagctcgccgtccgcccggacgtggaggttgtactccccgtgccgacacgagctgaagggcacctcctcctggtagggcatcccggcgagacaggcccgcctcaacccgcggaccagcccgggcagctcgtcgtgcgggtagtcgtccaggggatcgtcgggtcccgggggtacgtacgcgatgacgaagtgcgccgcggcgcccagctcgaccgcaacctcgttgaccctcctgagctcgccgtaggtgtcccgacaggccacggtgttggcgtacacctcgtccggctcgagccgggccacctcctcccaggtcctcagggcgccctccagcccgtacccccggtgcggctcgagggccacgtagacgtggtcgacgtcggccagggcggggtggacctccgtggccacgttgacgcccacgccggcgtcgtacctccggcacagttcgacgagttccccgaacctggggtgtaggcagggctcgccgcccgtcaggatcacgaagtccaggtcgtaccggtccgcgacctcggccaggatccgctcgaggacctccgggtccaggtgcccggcgcgccgcgtcccccggaggttgcagtgcgggcagtcgtgggggcactcggtggtcacgtccacggtcacgtggaaggacaaggacggcggccccgggtcggaccgcgggacggggacgaaagcgtttcccggtcccgaaccgagacggtcacgggtaccctcaccggagggatcgaggagggggcgtagtccggtaccgcctcaccgccttctcaccgtcagcggcaccggtaataacggtagtacccagaccgggagccccgattcttcaccgccgcccctctccgggaacaggaactcgacgttcgagtgctcgctcatcacccgccgaagctcctcctcgctagcaccctgcccgtacatccggacgaccttgtcgatgaaccggaccaacgggtcgtccctcggcgcgccgaacttcacgtacaggggttcgacccccgagcccgtgcgcaggacggccccttcggggtactccaccagctccccggagagtttctcgatcagcgccgcgtccgtgatctcctccctgtccacgaggatcctaccgtccttcaggtcgaaggtcacgatgatggccaacggcttgcccccctcaccgaaccccaggaccctcatgaccacccggtccgagtatacctcgtactcaacgtccgacaccgagaggccacccaaatcctccctgtcgatcacccggtcaccctccttcaggaccgcgatgtaatacggtgggccacccacgaccagtttctcctccaccccgcagacgtagtcgccgacgaggacggtcacactatcgaaccccgaattcgcgaccaccgcgggatcacgcacgctcttcgagacctggatcgactccctacccgcctcggtcaccgtggccagctgaacctccacccgaacgctacccggtccgacggtcaccgtggccggcccgtcggtacccacgaacaggtccctgtccggtaggtagaccaaccgatggtgccaatcactgtaatccacgatcacgcgcgggtcgtccttccacttgggtagtacctcggactcgaggtactccttcaggaacgccttgtcctcggacagactcccccggatcagcagttctcctgaggctggggctagtgctaggactagtcctaggacgaggtaggggagcaagccggcacccctctcaggtcggtagtgggattagactggccagttgtaccgcgagcgtgacgacctgggctaatatgctcaggaaggtccccagggtcccgaggagggtcggctgtagtaccgagagacccgcgagcgcgagccccacgaccgctccaagggtcgcgaggttcagccggaaccttccaacccgctcgacagtacgagccttctcaagcttcctctcgtgagacttcaacctcacccacgcggaattcaccatcttagccacattatacgcagtctccctaagactagcagacaacccgataacacccgcctccgaggttaaaatacccttaatcttaccctcaaattcacccttatccatcctaccattcaagaaatcattacaagcgttgatagcctcgtccaacatcctgttcagatcgtttaagtctctcagggcgtagtacaagctgaatcgtgccattagtataccattatcgccatccaacacgtcaactaccaactccttatcatccttatacttattaagagtattcaggatgtcttgtactgtgttgatggaccattcgtacactggtactgactcgtccaaatacctcttcgacaattctacattacccttaatactcgataaatcagcccccttcttctcacaatcagacattagtttaagcaatttatcacacttaccagacgcttgcaccaccccatctttaaccttacccgcaacctgcaaacaatcactaaccaaccccacttgcgacgcaccaacagggatattagacaccagtagaacccctataagaagccacattaacctcaacccaccacacccccgtcgcgtttcgctctttgttcatatcttcatcattacaggtattccgaacgtactctcaagcatgagagaaaggatggtgtaataagacatgctgagcatagtacgtatgtctccggtaagcaggtcccggaagatctgaatcacgaggaggtgtaccttttcgggctcggggaaccacgacgcgttgaggtgatagtgaacctccatggctatgggtaggggtaggaccgtgagcagggcgtgtacgaatacgtagttcaacgcgatgtaacgtagcagcgagacgacgtccttcctcccccacaacgtccggctcttccacaggccttccaagagaccgtacgccagaccggagactactcccggcactcccaactcgatcgccaccagccgtttgaacggctcctccacgagcggggccagggtggtcctcgagtaccaacggtccagtacggcaccgaaggctctctcggccgcccactcccacgccgccgcgattaccggggctacgaacaatccgaacggtccgagcggtctgagtcgctctatcgccgtcttgaagatcaccacggacaccagcgggaacaacaggtctcggaacgctgtcaccggcaggattaccgccgcatcgttgtacatccatccggccgggtgtcggcacctgatctcgacgctcagaccgttgatcgtcacgtacagtccggctacgggacccaacaacgcgggaatgaacgcgaggggactgtcggtgatctcacgcatggtgttgaggatcttcagtgccgtcgcgagacgtgagccccggagggggtccgggcacgccgaactcgacccatacgacctcggtcccgtccggtgtcctgaccagcacggcgtcctgaacctcagagacgcgtttcaaccgggacctcagctctctcagcgtcgtctcatctatcgcactctcgctgaacgtcgcgctcttaccgttgaagttcaacgaaacggtgaccgcgatccgacgttctaagtcgtaaaacctgacttccgcaacgcctctgcgggcgtcaaaccggtactcgtagtagtcagccgaaggcgcgcggaagaagttcgaagcacttctccaatacttttcgtaccgaatctccgcctcgggaactactctcccgtccagcctcgcgaagatcactccgatcggactcacgaacgccgccgtaccgtcgcgcaggagcgtcaccggggccggggcgccgagccgcaggaggacgttttccaggcaaccggagaccacggcgggggttcggaggccgacgtggaactcgccgaacgacgtttggaccctcagctcgttcctctcgaggaacgtttgagggcggttatcggtgaggaggtcagcactcgggatcaaggtgagatagtgaatgggaaggtcgtcggcgacgaggcgacatcggtccaggtcgtgggacttcagacaggagagcgcttcgaggtagtcggccaccgtattaccttcaataacgtcgtcaagcgcgaatgctggactgagcggaatgagaaacataatgagaaacatgaggagggtaaaaatgggcgatgggcctgcgttcaggcgctgataccccctcttcttgccgctagcatcagtatatcattagtgcggcgacaaccacgatcggtgctaccggtatccactccctctcgatgtcgtctatcgtggtagcgttgtcgtcacaatagtatcctgagtgcgcctcgacgtcgtcgtcggtaatgacgcgaggcgctagatagagttgcatgtagctgttgcccgcgtcgccggtgggatccacgtgcacccacctgaagtcttggttatagaacgcaacccaagcatgtccttcgcccgccaatagcccacctacgactttcgccggtatcatcgccgccctcatcagagctactgccaggacagcgtgcccagcacagttccacccacgccagtattccttcaacacctgcaacggtgtgaactctgtccaatccatgtcgcccggcgtgctgtagtccctcgcggggatcttactagccacccagtaggcgattctcaccgcggccttgaacagttgggattcgagcgtacccccgttcattgcctgtacagcgtttgcgaaatccctctcgctgactttaccccacgtcacttcaccccagtagggaacatctttcgtggaacagtcgagagtatttggcgactcggccacctgaactaccttcagcggtgttggatcctccttacgctccggagctacgtagacgatgtacttgacggctttgacccagttgctcagcggccaggtgggtccgttcgacgagtggagccaatccacgacctcactgttcctcgtcacgtacttcttgatgtaatcttcttgatgtaatcaggttggttggcgacccaaccggcccatgggggtaggtcgccacaagccgctcccgtgatcgccactaccagcgcggtcgtgaggaggacggtcaccctcaacgagtccatgcgaccgccccggtaccccggtgaccttcttaaacgtaacgattttctttttgaaacctaacgagcaaaaacacaacagatgaaaacgtaacggattccgagcggagcgtagcgtcgaaggaccgcgacgggctcgggcccggcctcactcgaacttcctccggatctccctgatccgctcgatcgtctcctcgtcggcgtcccagtagccccgctcgtgcgcctccagcaacctggaggcgatctcgcggaccgccgccgggttcagctcctccatgcgctcccgggtctcctcgtcgaagaggtactcgcgggccacgccctcccagatccagtcctccacggagtccgtcgtcgccgcgagaccgaccaggtactcgacccgcttcgcgatctcccggcacccgtcgtaaccgtgcttcagcatgtggcgcttccacttctcgttcagcagccgggacaccgcccccgacctgacgacggtctccaggtcgtggacctcggggtcccgacccgagcacgagtcgatcacgtacgtctcggcgtcctcagcggccgcggtcagcccgccgaggaactcgtagtagtggtcgaggtcgatgatgtcgtacgaccggtgggacctcacctgcgcggtcgcgtcctgccggcccgccacggcctcgaagagcccgcgagcctcctcgccgtggaccccctctccgtagacgtagcccatgtcgttcaggtacgcgtcgatcagctcggactcgtcgtcccagtccgaggactcgaccttggaacgcatgttgtcggcggcgtagaggtcgggcctgggcccgaacacgcgggactcgggccgcccgtgcccctcctcccgcagctcccggacgtgcttcctcaccgggttgacgtcctcgggctcgtcgagctccgccaccttccggaccgcgcggtcgatcagctccaccacgttcgggaacgtgtcccggaagatcccgcacatcgtcacgaccacgtccaccctgggccggtccagctcctccgccggcaccggctcgacgtcgatgacgttgcccgcgtcgtcccgcaccggcctgaccccgagcagctcgaagatcatcgccacggtctcgccgcccgtctgcatcgtctcgaaggcccagaggacgagccccaccgtctccgggtactcgccgtgctcctcacggtagcgctccaggagctccctcaccgccttccgggcgcgctcctcggcctcgggggtcgggatccgcctggggttcagagcggtcaggttgcgaccggtgggtacgacctcggggttccgctcgatctcccctcccggggacggctcgaggtagtccccgcgcagcgtgcgcaggagggactcggtctcgcggtcgtaggactcgatcagcccgtcgacgagctccctgacggcgtccgggtcggcgaagacctccgacagccggtcctccccctcctcgacgtactcccgcacgacctcgacggcctcctcccggtcggcgtccagcaggtccctcgactcggcgtagctcacggccgtctcggcgaccagctcggggtccgggtccgccccgaccacgtggagcccgcacgggatccggtccctcagcgcccggcggaccatcgattccaccgcgcccacgtacgcgtcgtcgtcctcgacctcgacccggatcccggccgccttggcgatctcgcggagctcctcgacgtcctcccggccctcccggacggcctcgcaaagccgcaggagctcccggtaacccttcagctccgggtcggcgagcggcgggtgcaggtgcgagaccatgtacgcgtacgtccggtgcttggcgatcgcggcctcggacgggttgttcacgttgtacaggtacacgtgcgggatcggcgtgatgaggagatccgggaagcacgcctcggagagcgccttctccttgcccggcaggaactccagggtcccgtgcgtaccgaagtgcaggacaacgtccgcgccccactcgcgccgcagccactcgtagaagcagacgtagtagtgcgtgggcggcgtgtcctcgtggtatgactcctccgactcgtggaggccccgcgtcggctggaagcccacgaacacgtcgcccaggtcgagcccgaagatcgggaacgccccgtccacgagcagggggtcctcctccggttcaccccaggcctcgagcacgcgctcccgggacccctccgggagctcctcgaaccactcccggtaccggtcgagcgggacctcgtccgccgcgggcacgtcctcgggtcgtcggtgccgcaagtccgggttacccagccgcctgagcacgtcgtccgtgacccggtcgaggtccacctcgaggtccagcccgtccctcaacagctccagcacgttccgcaggctcgagaacgtgtccaggtacgcggcctcgcccacgttctcctcacccggcgggtagttgaacaggacgatcgccaccctcctcgggccgcgccgccgcagctccagccacctgtacacgagctccgccgcgcggtccacgttctcccggatcggctccatcgcgtgcaaggggacgtcctcgaagcggccgacctccgactgacaggccactggcggtaggaagatcgccgagtccagctccggcagggacacgttgatgagcaggctcagcgggtccatcccgaactcgttctcctcccactcctcgcggtccaggtaccaaacctgcggggccacgaagtacgggacgtcccagcgccggagcagctcgatcccccgctcgacctcgccgcccatcgggccgccgacgatcctgaagcaggtcagggcgaccaccgcgtccgggcgctcgtccccgaagaaccgcgtcagggtcccgtaggcgtcgatcgagcagtaggcccccaccgcgccgacgccgcgctcccggagcgcctcgatgaccgcgtccacgtgctccgtgttcccgttcgtgtagaagaacttgtagaacgtgaccgggacgagcgtcccgtactcctcacggagctcccgcaggaagtccacgtcgatgaggccctcctccgggtcgtacagcgcgcggcccgggacctcttcgggcgggtcgggctcccgcaagtccgcgcccgcgagctccccggccaggtacaggagcatgttctcgacgttgtccgcgccgccgtagtcccagtaccggaacgcccgcatcgcgatcttcagcttcttgagcgcgccgaaccagcccatcctttccgcgaacttggccccgcgctccaacgcctcgtccatccggaccccggagaggttgtccttgcggcgttccatcatccgcccgaagaaccggaagaggcggctcttctcgagccccaggctcttgaacgaggcccgcatgacctcgaagcaggagtggacggccacgaagggcgtctcctccgcgatcgcgtccaggtcgacggcctccgccgtggcggagtccatcacgttcaggaccgcgaagtccgccctccgcatcgcctcctcgaactcctcgggccgctcacgtagatcccacatgtagaacatctcgacgtcgatctcacccttcagacgctccgcggccttcgcgacgctgagcgagtacggttggtgaccgaccacgaccacggccctgaccacgcgcggcccctgggcacgcacacggtaggcggtcataacgttttcacaccagcccaccgggagagtgagaaaacgtaactccgaccgggttgaggttgttccaccctgaaccctcggcccgtgcgtccggggtccgcccgccgcggaacccgtaactttacattgcgcaacgtgttataggacggcgggcggggtgacgaccgggatgacggcgtcgaccctgataacagagtcgaccttcgacgctctctccggcctggaaccaccacccgaagtcggtatcctcgtgatcacggcggtcatcgccaccgtcccgacggtcgtggcgatccgcatcggcgggatactgggcagggtggtggcgtacttcctgaccgtggccctgacgttctcggccttaccgctgatcttgcacatccaacggggtcttgagctcggtccccgggaactgctgacgctcgccctgatgatgtccacgtgctcgctctcgatcctgagactggcgacggaggggttgaagctcaccctcgggagcgccgtggccgtggtcaacctggccggcggcttcgcgctgctggtcgtggccgtcacgggaggttgggaatccctcgagctggccctgagctcccatcactggttccggctcatggtggtgcccgccatcctgacggtgttgacctactgggtctacgtggccgtcagggacgtcctggactggttgcggggacgtcgcgccgacccgcgggacctggaggccgctgaagccctactcgagggggtacgggcttgcgagagacggctgagaagggtttccgagtaggggccgggttcctgcacctggcctcccggatctccacggaccgcagggcgcgggccaaggccgaggggttgaccgccttcggctccgcgctgcagacgctctccgtcgggatcgccgccgcgctggggacgcggctcggcgacggggaggtcgaggtcaccaaccgcgccgtcgagtccctcgggatccgaccgcctttcgacgaggagaagtacctccggggtctgacctcggtgcgcgatgacccgaaccgggcctacgagaccatgtaccgggcgctgtggaggtggccccgcaaggtcttccgggagctgcaccggacgctggaggaggatcaggcggcgttcgcgggtatcgtggactacctgtgggaggagatcatacgccaagcccgcgaatcgccagccctggacgagttcgtccgcgaggtgggtaagggttggaaggtcacccgggaggccgccgaggcgaccggactggccggctcgatcgcggggacggtaggcgacctcctccgacggtcgctgtcccggctgcacggtggatcggaaggggaccgcgatcggtccgaacggcgggacgaacaccgatcctggcggctcggcgacgccatcagtcagtactcagggtcatccgaggggacgtcgcccctttcgaaacgtaccggggacgccccccgagggcggggtgaggttgctcgagatcctggctttgacggtgttgacggtgccggaagatccggggaggttcctcgaacacgtcctcgagaacccgaaggtactgctcgcggcgggagggggacggggaggggccgccgggggccgtggaggtggcttcggaggtaggggcggtggtagaggtggcggagccggtgcgaaactgtccccccgcgcgggtgagatcctcgagtcgcgagggaagttcctccgggagctcaggaggcccagatcgaacctgaagtgctgtccgtcgcgtcactccgagcgcgaacgccggcgactactgcgcctctacgggaaggtccgggtgtactactcgaccgtaccgccgaccctgacgatcggcggtatcgtggcgctcctctccacccccttcaccgtcttcctgcccctcagacgcgcgctgaaccgggtgtgggagaggaggtacggacccaggttccggggcggagatccactctggtacctcaggtacctcgacgaggttcggaggttcaacgagaggatcgcggggaggctctgggcgatctcggcgctcagcctcctgaccgtcgtggccgagggcgagctctcgtaccaggccgcctacgccttcgccgacgccgtggtggagggaggagaacccctgagcgccttctacgactgggccgtcctggggatggaggcactgctggccgtgtacgtggcgacgtccgtcgtgatcgcgctccacctggtgcggacgagggacccgaagcaccgacggtactgccccatcttccgagcctgcttacccagaccctaccggagacgggcttggaggacactccggacactgacggtgccggtgtcgatcctgccggtgatcacgggggcgtgggccctgcgatggggtctgtgggtcttgagctgaggccggacctcgacgtcccctgcggaaccgttattgatcgcctaacgtttcccgccgacacgaccgcgatccccactcggcggtagaggtcgtccacgaaacctcgtgggcgaaacgcccggccgacgatcgtttcgccactaccggtgaacggaattcccccgggatgactccgaaacggatgtgcacgaccggaacacgccacggcacccgaccgtaacggtgagagcggtggcgtccatgccggtgaccactcgcccaaaatgagaaacgtcgtgttttccggaggcgcacccccgcggccctccgccgatcccgtgccccgggggatcgacgagttgctggagcccctgacgctgacgctgctcgccctccccggggacccgggggatgtcctcggacccgtcctcgagcaccccgaggtgttccccgccatggggaggaagggacacgacggggagcggtggacgggcaggaggaagcgggtccagagggtcgacgccaagctctcccgggtcggtgagatcctctcggggaggtcccccggaacgcggaagggatccgagctccggaagcgctacccggagcggaaacgtgagcgattgctgtccctataccgaagggtccgactctactaccggaccgtgttcgacgagctggtgcgactcctcgtcgcgctcctcgtcacgttcttcatggtgtgcctcgcggtgaaggccgccggggaggattcggtggcgaacctcttccgcctcgccgggatatctattatcgtcgacatcgtcgcgctgatcgcgttctgcgagatcgtgctgacggcggtggaggacttcgcggacgccgtactcgcgggcgagagcccggaggccgccctcgacgccttctacggcggtgccgtcctgaccctcggttactccctgatcgcgtacgcggcggtcgcgctttggatcgtgcgacggacatcgagggagctcgacgtcaggacgctggttcaggcctcgatcctgatcctaccgctcgtcgcggggttccgggcgctagtgtgggggatgtgggtcacgggcaggtacgcggacgtggtgccgcagctcttaggcttcacctccgtgctgatcgtcatctacctgctcgtgaggctgaacctgaaactctcgaaggaccgggcgtcaccgtgacggccacgcgatgtccggcgtcacggggggcactcgggcctcttccatcgacctaggcccgggagggacggcggccgcgccgatatattatcgttccaaaaacccatgaccggccacggcgcgaccgcaccgccggtgatcggacggcgtacggtaccacccggggtcgggggttcggcaggatggagcccctgaccctggtcctgctcgtcttccctggggatccgggtgagcacctcggacacgcccttctggagcatccggagatactgtccgcggtgggaggaggacgcgggggcgtggcaggaggcagaggtggagggggtaggggcggcgccggcgtcaagctctcccgggccggtaaggtcctgaagtctccgaagaagttctaccgggtgctgaagaggttaaaacgtcggaagcaccgtcccgagcgcgaacgcagacggttgctactcctctactggaaggtccggatctacgaccggatcgtgccaaccgcgctgatactcagcggcttcatctcgttcttcgtcgtgccacccgtactggacttcctctccgatcgcctgttgaggaaagcgtgggagaggaagtacggccgcaggttccgtcgtacccgggagtggcgacatcggtgcgactacgagctgtccaggctctgtgacgacgtcacctacaggctcttcctgacctcgttgctcggcttcctagtcgtcggcgtcgaaggcatcttctcgacgtgggccgtcgaggccttcgccgacgccgtgctcaggggggaggggttccgggcggccctcgacgccttccggtggtacggtgtcctggggatggagtacctgctggccgcgtacgccgcgctgtgcgtcgcgatcgcggcctcggcggtggcgaggacgtgggagaggcggaggacggaacgcctgagggaggaagtccgccgtcggctggggcgtcgtcccgagaagtcggatccgccgagttgcattcccgagtccttcaggacctcggtatcgagggtcacccgcgcgctcgaggcgctgttgttgatcctcccgctggtcacggggacgtgggccctgcgatggggtctgtgggtcctgagttgaggccggaacccgtggggtcggggcgccggaggaccggccgccggcgtccacgcccggcgatcacttccccgggatggggagagttatgtttccgaaagcgtaccggcatggccctcacccgcggccctcctacgggggccgtgtgattgctggaggccctggttctggccgcgttgtccgtgccgggggacccgggagaggtcctcgagcgggtcgtcgagcaccccgaggtcctcctggccaagggaggggcggtggaggtcgcggcggtggagggggcaggggtggcgccggtgccaagctctcccgggccggtaaggtcctgaggtccccggggaagttcctccgggcgctcaagaagttcaaggtccgaaagcgttactcgaagcgggaacgcaaacgactgctgctcctctactggaaggtccggctttactaccggacggtcgccgaaggcgtgctactgtacgcctccttcgcgctcgcgatcgtgatcttcgccctggacttcctgacggacgacctggagctgctcagggaaacctggttcgagaggagcctctacctgacctccggcggcgcctttctcgctatcttcggcgagatggtagtggcaaacagggccgtttcggcgttctcggaggccgtgctcagaggcgggggcctcccggcggcgctcggcgccttccgggcgtgggcggtctacgggatggggatgctgttagcgatgtacgtcgcgctcgtccccctgattatcgcgctcacccggaaggaacccgacgtcaggaccctcccgatgctggcggtcccgttggccacggggatctgggcgctgtggtggggcctgtgggtggtgagttgagggtgatccggtcccgtgccggcggtctccgcacccgcccgaaggtcgaacccgggagttcgatccggcggtacccgcggggggtgtcaacgggggtgtcgtcgtccaccgaggcggacaacgtttagcgctcccgcgaggcccccggtccctcacaccgatcgcggatggtaaccgcacggaacgcccgaggaggggagtgtcccgtgcaccacaccgcgtccgagatgctggcggtaggcgccgcgctgggcgtgagcggcgggctggccccgggtccgctgcaggcgctcatcgtggcggagacgctcgggaacggcctgcgggccgggctggcggtggccgtggtccccgtgatcacggacggtccgctggtcacggccgcggggttggcggccgcgcggctccccggctgggtcctccggtacctcggactcgcggggtccgccgtcctggcctacatggggctgtcgctgatcagggaggcggactcggccgaacccgcgcggtcggagggcgccgggtcctcgctgcggcgcgccgtggtcgtcaacctgctgaacccacacccctacgtgttctggctcaccgtggggagctcgatgatgggttcggcacgctcgctcccggagatggtggcgttccccgtgggcttcttcctcgggatcgtgagcacccaggccgggatagcggtggccgttcaccgcgcgctctcgctgacgcccgccgagcgggtgggcggggcgaggcggttgtccggggtcctgctactcggggcggccgcctacctggcctacgtctcgctgcgtgacatgccctcctgagcgatgacgctcgccctctacccccggcggctcccgtccggcctcgagctgtactcgatcggacctcattcgacgcggcaccgaccgtgtgaggggaacgcgccggtccactccactcaacgcgaacccgacattccgccggaccgtaggtagggctccgcccggctcggagacggcaccttctccgtgcagatgaccgtcttcgggttcccgctcacctactcgctgggagggtcctgcctgatctcattctgggtctccatgatccgtgtcagcgactggctcgaacggccctccagctgtccgtacgaacccacccgttctccgaggacggagtgaggtcgctcaagcacacggtcgagagcgtacaccctccgagatcgggtcggtggtatcacgagggcggacgttgattcgcgcagaccgtccaacgacacctggtacgtcggttcccgccgtcgcaaccgcagccgtacgaaaccccgacggagtccacggaaacatccggtaaaaggagatcgtctgctcggtcgtcgcgccggcgtgtgaacgcgctcggaccgcgacggggcgcacaccgaccgcccgaggatccgtgaggcaccccggagcgtcatcgacgacgctgtcggcgcctccctgtgaagccagtaccgtgcgagttagcgtccaccgtcggcggtcacctctccgaaacggtaagggttacgtcctcgaaaacgcacctgcgcggccctccgccgatcccccggcgactggggggtcgatgaggttgtgggaatccctggtcctggcgatgctgtccgtaccggaggatccgggcgagtggctcgggcccgtcctcgggcatcccgaggtcctcctggccaaggtagggaggggcggcggaagagtggggatcaagttcccccggatcggcaggacttcgaagtcagagaggctcccccgggtgaagatcaagaactggggatactacccggagcgggagcgtgaagagcgcgaacggcgggagcgcgaattactgtcgctcgtatactggaaggtctggctttaccacaggatggtccctccgtacctcatgaaggctttcgtggtacttctcctcggggggctcggactcgtcgcactgtactgtctgggcgttttgaagaggacctggaggtacgcgcttctaacgtccgttctcgccgccgtctcggtgtcctacccgaggcggtgatgacgaattacgccgtcgaggacttctcgaacgccatgctcgcgggcgggggcctacaggactgtctccacgcctttaaggtatggggagtttacggcctctggaccctgctggcggcgtacgtgatgctcgtgctcgcggcggtcgtgctggcccggaacgcccttcgggatgtccccgtacccgtcctggccctgtcgctggcgatactggcggtcccgctggtcaccgggatctgggccctagactggggtctgtgggtgacgatgagctgagcccgccactccgacaccggccgaggccggacggtggagtggtactggcctcccacggttctcctttccccggaacgagcgggtgatgacccagcgtcccccaccgctccgaccccgtgagggggaggctctccgacggcaccgcgtggggtcccatcgacgagccgatcgggaggatgaaagggatcagcaccggggttactcctcatccggctcgggcgtccgccaccctcatcacccgacgtcgcccggggtcggccgcgtcgcgcctgtgggctctcccttaccgagttcggcgcaccgcgggacctgatcccgaatgtatctgtatcggaaaaacgtttccgcgtctcccatcacgcgcggacgtcggcagtgcatgagctagccgaattcgccgtcaagacgtgggcgtccgacggttctcacggctagggatcgcggcgtgggagatcacgctaccgtcgggtacggaacgccgacatcacgacgggggttgacggaacaagggtcgacgatgttcccccatccactcatgcggccgctctcggccgggaactatgctttagaaaacttcactctcaaaagcttcccggtgatcacgagaaggcgatccactcggggctgtttcaggttcgtagtcgtcgccgatcgtcgggttctacccccatcaattccacggcacgcccggatcactcaacgaaaaatataaagtaccagacgtgaatgtctggcgtcaggacacgggtcgatgcatcgtatccactgacgcatcggcgagatcctcgcacagcaccgatcgtcccgacgtactccgcaggcttccatcggtgtcgtgcgtgaaggaccggaacgcccgatggatccgggggtcgcccgaacggtgcgactcccggtggtcctcacaccttcggtgctcggaattctgctactactgtcgatccacgtcgcacgcccggtaaacccgagctcgcattacgcccttgacgacttcctgaaagtcgagttcgacggcatgcgggacgggatcgtcctcaagttcccggtcgccttggacggcgaggtcgtgtacggctcatccgcaccgggcaggtacccatacccggtgtaccggtaccgggaccctctggagggcgggatcgcgaacgtctggatcgagggtctaccgtacatcggccggtccggggttcacactttcatcttcaaggttatcaacacggaaggccgcccgatcttctacggcgaggttcaggtccgacgggacccgaggaccggtcggttccaggttctgcgcggttcggtgatctgcggcccgttcgtgtactgtccacgccccgacggatgcgtgatccgctaccggacgctagaacccgtgagaacggagctcgtcgtccggagaccggatggaggaatcgtgactcggctggaggacgggaaaccccggaccgtgcacgagttccgagtgacgggcctccgcccggacaccgagtacgagctgatcgtgcggtggaacgggttcgagctggcgaagcgggagttcaggaccgcggtaccggacggagccgcgggtttcacgttcgcgttcgcgagcgactcgaggtgcagacacctcaaggagtccgccggcggtggcgacgccgacgcgtacggttgcaacgtggaggcgctccggtcgatcatgatgtttgccgcgcggcacggggcgcggttcctggtctttccgggtgacctgatctacggacacgcgaccccggaggacgctcggctccagtactggaactggaagcaggccgtcgccccgtgggaaccctcggtgcccgtgtacgtcggctacggtaatcacgaggcggccgtggtcggatccggaggtcgatgctcgggcgaggaggtcttttcccgggagttcgtgactcccgccgagttaggccggggtcccgcgggcgtctcggagggtaggggattgccgccttacggggacacggtatactggttcgagtacggctgcgtggccgtggtcgtcttgaacaactgctactcgggaatgctccgggactggacgggtcccggcgagtgcccgtacctggggtacgtgatggatcgacagttgaggtggctcgaagagaccctcgacaggctcgatcgggatccgaccgtccggtacgtgttcgtggcggcacacttacccccgtaccggttaaccgagccacaggagctgagcaacaggctccgtcccgtcgtcaacggacgacccgtcggcgagggctacgtcgacaggttgaaccgtctcctcgaggtcctcatgaggcatcgtaaggtcgtggcgttgctctgcgggcacgaccactgctacgcgcggtacctcatcgacaggaacttccccatgtacccgaagggctggcggggtcgggacatccgacgcgagccctggttcaggccgctctgggtcatcatcgacgggaacgcgggcgcgcccatgttcaccctcgcggacagcccgtggaaggaccgcgtccgggtcttcaccacgcgctcggccgtggtcgtcctcttccacgtgcggttcgaccggatcgtcgtcgaggcctacgatgccaccaccggggagcgcgtcgaccggttcgagatccccgcgccgggctaaccgtctgaagcgctctcacccacgtactcttccctgctccgcgcaaacgcccgcgatcggacactcctcacactccggctccggacggcagcacctccgtcccagttccacagtacccagcgcgaggtccctgggatcccgggcggctctcacccactccgcgccgacatctcccacgggacgcccagtcgaccgtctcaccacgcgacgcacgttcgcgtccacgggcaggacccgctcccggtacacgaccgcccgcaccaggtccgcggtgtacgggcccaccccgggcaccgagagcagatcctcgcccgagggttccgggtcttccgacagcagcctggccagccccaggacggccttcagcctccgttccaccagaccgatccgcgcgagcgactccttcagctcgtcctccggggccttcaggaggtccgagggttccgggtaccggcgcagcagttccctgagcaccggctcggctagctccctccgggtacgttgatgtaacacacccgcgagcgcgaccgagtagacgtcttccctatcgccccaggccggttcgtactccccgcgctcctccatcccccggagccaccgctcgacgattctcggcgcctccaagagcgtcgccacccggaacggttttccgtgcccagacccggatgagggttccgggatgacgaggcaggggatcgccgaaccggtgaggacacccaggggcaccgacccaccgttcattcggaaacatattagttttagagaaatcggaggtcatagggcccggagacctggaggctcgttcctagaggccgccaagaacgcgatccgcgccgccggcgaccccccgagggtataacggcgtgatcgtgttcaaccgcgtggcccggtacgaaatcgtgagcacggacagaccgtcaagccgctccgacgtgagctcgggaacgtgtctaccgtggggtaaccgctgcggggaaatcgacggcacggaaagcggtacgcccttacccccaaccggaccgcctccctcttcgcgatcggcaacgagctgatcggtaggtggtcgggacgaccctccgtgtgcgtcgtcgacgacgcatggagtcccgtcgccggaagggaatatccccagtctcacccagacccgaatggacgcgactccgacgttccggtccccattgtggtctactttcccgtcacgataccccccgagccccggacttcaggccgtaccggtccgagacctcggcgagggtctcctcgaggacctccgggcccaggtgcccggtgcgccgagcccccgaggttgcagtgggggagtggtcacgtccacggccacggcgcggaacctatcccgaaacgaccccgtggaaccacttcgacgatatcatcaagttaataaccgacgctagcggggcggtggcccctccgagacccccgggggggggcgtcggggaggtgagggacgtcacggtgatcgtcctggccgctctgatcgccgtctttccagtgatcgtccatccgatgctgcctcgggactcccccgcgcacgtattcgggcccaggtacgcctggtagatcctgacaggacgagcttctccggatctctgccatttactggtacacggggttcccttacaccaccttttactgcttcctcccttactacctagcggcaccgctcaccacgctgctaggcccgttgtacaccttcgtggtagagctctcgatcgcgaccgtcctgttcatctcgagtgtgtacctgctggccaagagcgtaggattcgatcgggatagggcgatcgcggcctccgtcctcgcggcttccgggatgcttccgcagtgggagtggggcggcacctacccgatgacgctgtcgttcggcttcggtctgctggccctggcgatgcgagaccgtcggatcctggccccgatcctcctaaccctctcactctactctcatcccttgggcggcaccttctcctcgctcgtctcgtgatgctactttggggcgcgttcgagaggagacccggatacgcagtctcggtgggcgtggcttgggctctcgccctaccgcactacgccttcttcctaccgtacgcccgctggctttccacgctcatcgactcgccggctcccgacgagctgtttcggatgctgctcctgcccttccccgacttagtctcgcccggcgccttcctgctggcgctcgcgggattgggcctgtggagggcccgccgcgagccctgggcccgggtcaccggggtctgctgggcgctggcgtgggggatggtcgcggcctacgcgctaggtctgacccggcacctacccttcggccggaacctcctcctggaccggttcacgtgcgtcctaatcaccccgctccttgcgctcccggccgcgtacatgctccgagatcgagcccgacacgtccggatagcgtcgaaggtgctgctggtactctccatctcgtccgcggcgctgccgttatctgactcgttatcctgtgaactaccgacggtgccgggctcggccgacgtcgtagcttgggtgaaggagcatcggtcccatgacccgatagtcagggtggagttcctcctcgcgacgaagaggtacgggaagccccacaacgccctgtgggtgggcccgcgtgtgaaggggttcttcgcccagggagatccgtacttccacgcgctgacggagcggatggagtgggaaggattctggtggtacgatcccgagttcgtgcggacggtctgccgactgtgtaacatagagtatctggtcgtgtcgtcattccctaccgtgaagtcgggtatggcggcgggtttgacacccgtgtacaagtccaagtggatacgggtgttggagaaccggaggatcgcgggcgcggaggcggtggacccgatcggcgtctacgatccgaggtcggtccgcgaggtcgtgaaggagtacacgaccgcgctgaacctcgtcccgaagaggggttaccggtacatcttcgcggtcgtcgaggacccgcgggaactctccgcgttccggaaggtcctgatccgacccgaatcaccggaagacgtccgactggcggtgcggttggcccgcgagggcaagcgggtgttactggtactacccgccggggacgaccggatcgcccgcgaggtctcccgggaactgggcgtgcacccgaaacccgcggaactccgactacggcccaggtaccccaaaccgatcctaccacgatcgctgcgcacgacgctgatcctgaaggggccgaagcgatccgagaaggtgccccccggctaccaggtgggcggtgggtggttcagggacgtgcgcgtgggtcgggggacggtccgcgtcgtgggcgtggacctgcccgtcgtggcgatacgcctgcatccgacgtacgtcaacgtcgggaaggatttaggcaagatcccgccgctgccgggtccgcatgaacgacgtctgtactcccggatactggacgggttcgggtcgggactccacccgattccctgtcggttcgatccccgctccgcccgcgtcgaggtgatcccttcgggataccagtgggctctggtcaaggtgaagcacttccccgcgtggcacgccagcggcgggaggatcctcgtgggtccgggcgggacgatgatcgtccgaacgcactccgaacgggtgatcctgtacttcgcctacccgacccgactgtacgcgctgggcgcggtagggttcgcactgggcgcgctggctctggcgcttcgggcacggccggatgccgtcctgtccgtaataccgggacagcgtccagagtccgattaacacaacggaggatcgtggtggagcagaagccggggcgtcgcggtccgtcggacgacgtcggaaggttccggccggcctactggagtctccaacctccggaatagctcttcgaggtaaagatccacggcgatggagtctggaccgtggatcgcctctcggcccgttctcctggagtcgacggctcacgtgatcctcttcggacggaaccccggtagttctgcgttactccgggtcgagccgcgagcacactttaaacgggtggaccggtccccgccgggggccgtcgagttggccgagcgcccagaggagcgccaatggaaggagtgggaggaagcgggcctcttcgaggcggatccggacgaccgcgagtcggtctacatcacggtcgcgtacccgtacccgtcgggttcgatgcacgtgggtcacgcgcggacgtacctggttccggacatctacgcgcggttcaagcggatgcagggctacaacgtcctgttcccgatggccttccacgtgacgggtacgcccgtggtagggatcgcggagcggatcaaggagggcgacgaggacacgatccggctctaccgcgacctctacggggtccccgaggaggagctggagaagttcacggagccggaggcgatcgtggagtacttcgcgcgcgagtacgaggagaacatgaagcgcatgggttactcgatcgactggcgccggaagttcacaacggtcgaccccgagtaccgctcgttcatcacctggcagtacctgaggctccgggagaaaggcctcgtcgacaagggcgagcatcccgtccggtactgcccgcactgcgagaaccctgtgggcgaccacgacctcctggagggcgaggacgcgaccatcgaggagctgaccctcgtgaagttcccggtcgagggcgacgacctgatcctcgtggcggccacgttccgaccggagacgctgtacggagcgacgaacgtatgggtgaaaccggacgaggagtacctggtcgtggaggtggacggcgagcggtgggtggtctcggaggaagcctaccggaacctgaggcaccagaaggacggcgtggagaaggtggacacggtgcggggcgaggagctgatcggcgagagcgtcgtgaacccggtcacgggcgaggcgctaccggtcctaccggcggagttcatcgacccgaagttcggaaccggcgtggtctactcggtgcccgcgcacgccccggcggacgcggccgcgctcgaggacctgaagaaggacccgtcggtcctcgaggagtacggcgtggacccgtcggtcgtggaggagctcgagccggtgcaggtcatcgaggtggagggctacggggagttcccggcctacgacgcgctggaggagcacgggatcgagtcacagacggacccggagctcgagaaggcgacgcaggaggtctaccgggcggagctgcacaagggtgtgatggtagtcgacgagttcgagggcacgccggtgcgggaggcgcgggaggagatcaagtcgcgcctgatcgagtcgggcgacgcggacgtcatgtacgacttctcggagaagcccgtgatctgccggtgcggtaccgagtgcgtggtcaggatcctgaaggaccagtggttcctgaggtactcggacggggagtggaaggagcgggcggaggagctgctcgggcgcatggagatcgtcccggaggaggtgcgcgcgaacttcgaggatactatcgagtggctggacgactgggcgtgcgcgcgtagggtcggcctgggcaccccgctgccctgggacccggactggatcgtcgagccgctgagcgactcgacggtgtacatggcgtactacacgatcgcgcaccggctgaagggcaagggcgagctcccgcccgaggtgttcgactacgtcttcctgggcgagggtgacccggaggagatcgccgagaaggccgggctggacgtcgaggagctcgaggcgatgcgcgaggagttcgagtactggtacccgctgaactggcggctctcggcgaaggacctggtcacgaatcacctgacgttcttcatcttccaccacgcggcgctgttcccggaggacaagtggccgaagggtatcgtcgtgttcggcatgggtctcctcgagggtcagaagatgagctcgtccaagggtaacgtggtcctcctgtccgaggcgctcgacgagtacggtccggacgtggtgcggctgttcctcgcgacctcggcggaaccctggcaggacttcgactggagggacgagtacgtccgaggcgttcagcggcatctggagcggttcgagaccctgatccgggaccacgccgacgagtcggtggaggataaggacgccgtggaccggtggttcctgcacgagttccgtgaggtcgtcgaggagaccacggaggccctcgaggggttccagatccggcgggcgtacaaccgggcgttctacggcgtcatgaagctgctccgcgagtacgaggccatgaagggacacgtgaagatactgggcgagatcgccgaggactggctgaagctgctccacccggtgatcccgttcgcgaccgaccggctgtggcgagaggtgctgggcgaggactcgttcctgctggaggaggagtggcccgatccgtcggagtacccggaggagcctgagctctccgtggccaaggaggtcctggaccggctgatcgaggacgtccgcgacgtggagaaggtgatcggtgccgaacccgggtacacgctgcacgtgtacctggcgccggagtggcagtggcgggcgctggagttgatcctgaaggacaaggagttcggggaagtcatgtcggagctgatgaaggacgaggggctcagggagaagggcgacgaggtggcgaagatcgtgcaggagctgacgaaggaggatctgccggaggacgtcgacgtggacgcactcagggaggccctgacagagttcctggaggccgcagggcgggccctcacggacaagacgggcgcctcggaggtggtgatccacacggacccggaggaagctccgggaccggaggacaggaaggcgggagcccggccgctcaggccgggcatctggctggaggagtaaacttcagtgcttcttgtacagatccacccacgccctcattctcaccgtcctccagcctcgctcgcccactagctcgatgacggcttcccgtgtcgcctcgcccggtagcacgacgaaccgctcgaccggttctccttcgggctcctctacgccgtcgacgaacggttccatgttcgagtacgacgcctcgatcgcctcctcgtcgagcgtctccagcagcccgccgatcccgccagcctcgatcagcgcggcgagcgtcgcgagggtcatcatggcctggcggtcgatcatctcctgcggtgcgccgagcgccttcaccgcgcagaactccttcagcgcctcgatcacgcgcttcaataggacgacgctgaggtcgccgaccaccgataccagctccacgtgcgggagctcgaagacctccttgcccgtggaggacaatacctcctcgacgagctccgcctgctcctccgtggcgaggacggtgccgttgcccgtaccccgggcggtgatgtaggcccggtggttctcggtgcccgggatgcccgctgggtgtgcgggcatcacgccgacggcttcgggcacctccagtccggcctcgtacaggctctcgtgaatctcgaaagcggaagacgtacaggtgggacaaacgacggccccttcttccagatgcgaggctatctcgcggatgatgccaccggtggcgccgaacggtgtgaacaggacgaccatctcggccccttcgacggcctgggcgtcgtcctcggtcaactcaacaccggcgtcggcgacccggtccacgtgctcggggtcctgctcgctcaggttcgggtccgcgagtacgacgtcgtggcccgcctcggcgaactcgatcgccatggctgcaccgccgaagggtggctccccacccagcttctcggcggcgccgatcctctcgtacaggcgctggttgccgaagccgaggacggccacggtggccaagtgctacccccttatcacgaccgcagggatagcatgataaatgccacggtttggaaacgtcagccgtcaaaattggggtcgggtcacaggcggtcccgcacgagctcggagagcgggtcgccacgcatgaactcggccagggccttacccagctccgggtcccgatcggccagctcggccagctcctcggcggagagcagcctcacctcaccctcggaagaccgcgctaggtccttcccgaaaccgtgggacaggagcgtctggcggtcggcgccctccagacgccccaggaggtcctcaggacgtacgaacttgcgctcggcccgagtcgccagctttccgtcctcctccacccagaacctcccgtgggcgcggacgaacccgcggaccctgtcctcccggacccaacccgacgggcccacgcgccactcgagctcgggcagttttccgtgctcgaactccaacaggacgtacccatgctcctcctcggagtctcgcatgacgtgccaccgacgcacctcgaacccctcgttctccagcaccctgctgaggctcctagccgtcttctccagctgcggccagtagatgtcctccacctcatccggcagccgaacctcgatcgcgacgacgtgggtggggttcctctcgaaccaatccctgaccttctctccactcacgggttcgggcttcctcccccggaagaactcgggcgacggatcccctaggaacgccctggccgccaggatgaagcgggtgagctggcgccttgagagggccgccgccacgttgcgctcgggatccacggggtctaggacgatcagcgctgggtcctgatcctcgaacgtctcccttacctcgtcgtagtcttcgtaaacttcacccacgaacccctcgaggtcgatgacgaagccgggcctccaggtcctcacggcctcccggagtacctcctcgaaggacccgtagtggatcgcgagaagctcgcagaggtagccggagaaccccttcacgcggacctccgcaccgtacgcgtcgatcgccttgacgaaagctttgagcagcctcgcctcgacagtgtcctccaggtgctcctcgacgtagcggttgtggtgcggcgtgcgatcgaccggggtgataacttcgcccggttcggtatcgtagcagggtacgacgtcgacctcgaaggtccgaccccggtgctcgacctcgcccccgatgtaagggtgatgcgcgtactcctcccgggcctccccgccgagcgcctcgatggcttcgcgtcctacctccagcgtgacctccacgatttcgtccaggtcgcggtccttcgggaacacgcagaacacgtcgacgtccgaggcgcccggcagccaggtgtccctggctaccgagccgatgagctcgacctcggcgtcggggtcgcgctccttcagcctgtccctaacctcgctcaggatcctacgtgcgaagccttccaccagctcgcgctcctcggggtccggcgtgacctctcgtctgatctcgtcgaggacctcttcgaggctcaccgaacccgccccgccgggctactggagcgattatcgtgaaggagcgaacgtgggcaccgatcgtccagtgccgggcttatgagggttaagtcccgatcccccgaatcccgatctcctcggggcgtgacgcccggaacgacgccgcgccgggcacatcggttcagatctcgacctcctcgaccgtgtggtactcaggaccctgaggcctgaggatgctcttcttgagccggatccggtcgacctccacctcaccgacctccacgttcgagagctcgcggatggcctcgatcagccggcccttgttgcgcccgctccggaccctggccacggtcacgtggggcacgaagtccttccgctcccgccggaaccccatccgaccgagctcctgctcgagcaccgcggccatggccttggtctcgtcagacccctcctgcacgccgatccacaccacgcgcacgtagttggggttcgggaacaccccgatccccttcagccgcatcgtgaagggctcgacagtctcggcggccttctccatcgcgttgaccacatcggtgacgcgcgactcggggatgtcacccaggaacttgagcgtgaggtgcacgttctccggctccaccagcttcaggtcggctcccgaggccttcaaccgctcctgcacctcgacgatccggttcacgacctcctcgtcctctatatcgatcgagatgaacgccctgaaccgcgacacgcgtcccacccccggcgaagttaattacgggttcgtaaaaggcagttctcacggaggaggcgaccggggggcttagcatccccgccgaaccccgtgatccggtcccggacgccaagctcgtcgagttaaaaccgttgggctaccccgtacgggagccggggatgggtaaggaggtagtcgtggactcgctggaagctttcaacgcgtacgctcgtgagcagtggttaggcgaggtcgtgcgggagggtacgatactcttcgacaccggcgtcgttcacagctacgccttcaaggtcgtgcgcgtcgtgccctccgggatgggccggataacgtcctccaccaggttcgtcctccgcacccggttcgaagaggaccgcatggagataccgaacttaacgctcgacgacgtggtggggcacgaggaggccaaacgcgcgtgctcgctcctcgtcgagtacctcaagaacccggaggagttccgggactgggccccgaagacggtcctcttctacgggcccacgggcacgggtaagacccatacggcgagggccgtggctggggaggcgaaggttccgctcctccacatgaacgcggccgaaatcctcggcaagtacgtgggtgaggccagcgagaggatccggagggccttcacgcgggcccgtaaggcggcaccctgcgtgttcttcctcgacgagatcgacgcgttggcgctcgaccgacggtaccaggagctccggggggacgtggtggagagtgtgaacgcgctgctcacgaacctcgaccggctcaagaacgagggcgagggtgtcgtgttcatcgcggccaccaaccagcccgacatattggatcccgcggtgaggaaccggttcgagtacgagatcgagttcacactaccgaataagcgcgagcgcgaggagctggtccgatactacgcgaagaagctacctatgccgctcgacgtcgatccgaggtacatcgcggcccgtacgggtgggatgtcacacagggagatcaaggagagggtgctcaaacgcgcactcctcgaggcgttacgtgagggtgccgagaagatcgagcggaagcacatccagaaggtcctgaatcaggagcgggagcgccgggcagtccgtatataccacaggtagtagcccgccgcgtggcgggccctcccccgccgggtccccacacctacggggttccccggcggggtcacgggtaatcctccacttcttccacgtccccacggacctccacgcccgacccctcctcgacgcggccgatccgtcggtaccaaacatcgcgccgctcaaacgcatcctccaggtcctcggcgtgttcctccggcaccgcgaccagaagccccccggccgtctccgccgactcgccccgctccagcccgtacccgagcgcccgtgagagctccgtcgtccccgggatcaccggcagtcgctcgatgaccacgcggacgccgctggcctccgccatctcacccgcgtgccccttgagcccgaacccggtgacgtctgtcatcgcgtggaccccgacctcgagcgcggcctccgccgcgtccttgagtggctcagtcatcacttcgacggctaggtcaacggcctcctccagctcggagtccgtcaggaactgcttccggacgtcctcgggcagcctcagggcggccatcgccggctgtgtgccgagcggtttcgtgaggtacaggacgtccccgggctcggccccaccgaccgtcacgtaccgttcggcgaaccccgtgacgcagccgccgaggatgggccatgggttcataatcgtgtgtccgccgacgatcagtgcgtccacttcgcggcactggtccgcgaacccctgcagcatctcacgcgcatcctcctccgggagctccctcgggaaccccgagaccaccaggacggagagcacctcggtggctcccatcgcgaagacgtcgttgatggagttgttcgcggcgatccgtccctgggtgtacgggtccgggtgtatcggtgtgaagaagtccaccgactggatcacgtagccgccgtccacgcggatcaccgcggcatcgtcgccgacaccgacctccacgcgcccgccttcctccggcagctcgacgcccttcagcagatcctccaggtctccctggggtagtttacaggctcatccgtggaggtccgccatctcgacgaggctcttctttctactcatgctacggtacccccgacctcacccgatagatgacacggcttaagacgtgcccggagccatactgatggctatgaagtgcgtcgataccgtaccggtgggaagcgaccgtaggaccgacgagggtgcggatgggtcggaggctccggcagaactagccgccgaaggccgcgagggccggatgacttcagggtaagtccgggaggtcctcctcgtacacgtgtgcgttggcggcatacaccgtcaacgtcgtcggttccagccccgcccgctccgccacgtgctcttgtaaccttctcagggcgatcatgttcgcgaccagcgccttccccacgtcccacgagcggtagaacgcgtggagctcgagaccactacctccgtcggactgcagttggagtgcggtgaggcagggtacctcttcctcgtcgagatcccggcgtggatcccaggttacggcgatagctctcctagtgttattagattcagagagcctttccactatcttggtcacttggtccaggccgaagtaccgcctgagccgatgaccgtaggtgtactcgaaaccccgtagctcgggatcgagcagctgatcctcgtacgcccgcacggagtgctcgtcgagggggtaatcgtccgggatatcgaaggattccggtccggagggctcgaggtgtgctatcaggccgcgtacttccttgaccggaccccgctccctctccaccttctcgccgtgtaccttgatcccggtgacggcctgccgccacacctgctccacggtgcgcccgcgtacgaccaacggtctgcccttacccagcacgtcggcgccccggtcggacgcggaggcggtccgttaaatctaaccagtacccgccgtacctgatgggaacccgcgtttccgagcgggggagttactcaccacgcagctgcatcctctcctcttccgggatctccgagatctccagcccgcgcatggccacctcgtcgcccaggttcttcgacacctccgccacgacctccgggtcgtcgtagtaggccgtcgcttcgacgatagcttccgccatctcctgcggtctatccgacttgaagatgcccgatcccacgaagattccgtcggcacctagctgcatcatcagggcggcgtcggccggcgtcgcgataccgcccgcggcgaagttcaccaccggcagcctgcccaggctcgcgacctctgcgacgaggtcgaacggcaccccgtactccttcgccttcccgtagagttcttccttgtccagtcgggtgagctccgagatctcgcgccggatgatcctcatgtgccggacggcctcggcgacgttacccgtgcccgcctcacccttcgtccggatcatcgcggcgccctcggcgatcctacgtagcgcctcacccaggttcctggcgccgcagacgaacggcacctcgaactcccacttgttgatgtggtgttcctcgtccgccggcgtgaggacctccgactcgtcgatcatgtccacgccgatcgcctccagaacctgcgcctcggcgacgtgtccgatcctgcacttggccatcacggggatggtcacgtggtccatgatctcctcgatcttggcggggtcgcacatacgggcgacgccgcccgcggctcggatgtccgcagggaccttctccaacaccatcaccgcgaccgcaccggcatcctctgcgatctgagcctgctcgacgttggtcacatccatcacgacgcctcctttcagcatgcgcgcgaacccggtcttcacacgccacgtaccggttttcatccggatcccccaattaacctgttgtgaaggtttatatagtacgatcacgggcgccggagggggttggatgatttcggaagatagcggtagtaatgaggatcgggaggttaagatagccgtgatcgggccggaggacgccggcaagaccactgtggtccggcagctatccgacaagttcaccacggtatcgccccgtgggaagaccgtggggatcgacttcgggaagtgcaagtactacgagggggtatacatgtttggcgttccgggacacctgcgattcaagttcgtgatgcgtctgggggcacggaacgccgacggtatgatcctggtcatcgactcggccgatccacgcatagacaaggcggttaagatatacaatatcgtgaaaagtgttgtgaagaacccgcatcgcgtcgtggtcttcgccaacaagcaggacctccccgacgccctgtcgccggagcaggtcggggaactcgtcaagagggcactgggtatctccccacccgtgatcgggaccgttgcgattaaaggggaggggttacgggaaggccttgacaccttgctcttccagcccacctacaacggaactaatgaaattgatgatatcgagattaaagggatccgctgagcccctacaggggtcccgacgttgcccgtccccgtcaagaacagggccaccctcgcccaattgatgttatcctatgggatcacgatatgcgtagacgaggatgtcctccgggccatcaacgagatgacgttcgggcaactgcctatgatcctggatgagtccgtcaacgtccccttagagtatgaggagaacatcatagacgctgaattggtatcactgttggagttcggtgaggatatggtatcctccctcctcgacatgatcgttgtcgtgagggtgaacgccgtcaacggtaccggcacaccgtgggagttattaaacaccatcctactggccgacaatccgggaaaagtcgagttaaacggttcttacttctccatcttcgctatcgacgagagacagatcgtatacatatcgagcagcgggagacgtcggataccgtacaccgatctcacttacatgaaagacatatcggaatgggtgaatgcgcgcaatataatgtccccgaattacgcatatatatatgacgagagcgcgctcaacattacggaggatgtgctaaagaagagatacagggcgagtatcaaaggattatcagaattgcttgatagacctaaacattgggtgcgaattgatactactattacggagaaaaaggacggtatattgattagagatagacttcttgattggatagaaccattagaattcactaagataacggtaagacgtgatgtggatgagccagctatcgaggcaattactggtgagtcaaaagtgaataaggtgtatgcacttagggtattcagggagatcaaacccggattcaaaacgtaccgtgaactcgtggagagggcccagttaccggattctatagtgaagtccaccttagcactgttcacgaggtttaacttcctgatgtattcattcaagtacactcctccgataatttagctccgcggggggaacgtagtatgacttctgaggcattcaccggaaaatacactcaggtggtactcaaagtgcctgtgtataagagtgcaggtgttgagtacaaaccgtcactgtatgtgattccgatgtgttttcagggcgatctgatagcgggcgagctggccgtcgccaccctacttttcgtgataatcgtgggctccctctcgttgatctcccttcggaacgccattcatgccagggataagggccgagtcgtactccacatcgggatgctgacgttcctggcgtcgttcacgtacgccgcgttccgaatggtccaatcgtcccttttcgtgccggtgggaccaccgtcacccagaacggtcgcagtgcccccggcgatcgtgagcggcaacgagatcaacatggtcttcgtggcgtcgctgatcggcctcggtttggtcgtggtcggagccatcgcgtcgatgacacggcgcatccgcgtgtagttccctctcccctcacccatcgttaagagtgacgtaacgttagggggatgtccgtgacgaaggtctacttcgtcggcgccggtccgggcgaccccgagctgatgacgttgaagggtgtacgggtgcttcgacgggctgacctcgtgatataccccggttcgctgattcctcgtgagtctgtggaggaatgggccccgaacgccgagctcatcgacagtcacggcaagacactggaggagctggtggagaccatggtcgaagccgtggaggacagccgtaccgtggtacgactagtttcgggagatcccttcgtctacagctcactgtacgaacaagtccgcgaactcagacgacggggagtggattacgaggtgatccccggcgtaagctccgtcaacgccgccgcagcggcactaggtgaggagctgacgaaacccgggatcagtcagacggtgatactcacccgcccggccgggaggaccgggaagcccgaaggtgagtcgctttccgagctcgcggagcacggttgcacgatggtgatcttcctgggggccgcttacctggagcgcatcgtgaagtcactgctcggaggcgcgtacgacgaggataccccggccgccgtcgtgtacaaggcgtccacacccgaggagaaggtgatcctgggtacgctaggagacatcgctgagaaggcgcgtgaggagggtatcgataggaccgccctgatcatcgtgggtgacgtcttgaaggaggaggggaagaggtctcacttatactcggaggagtacgcgaggagggtgcggagatgacggggctgggattctcgccgaaacgtcgtctagaccgcgtcgtggtctacgagttccgggatctcccggtgctcgacgacgttctggagttcttcgagctcctgaatgtcgaagttgacgtcgagaaccggttggggttcgatcccgacgcggacgcgctagtgtacgtgtgttcaccggggatcgcgacccgggcgttaagactgcgggagaagggtgaggaccctgtggtcgtggtcgtgacgcccacccgagaggtggtgtgcctctccggccaccactggggcggggacgagctctccgtcgcgctggcgggatggttgggcggccgtcgatcgggtctcaccgccgcggaggcggagtcccgcccgtcggccgaggacgtgctggacgttctgggcgtggacccacgccggtaccgggacgagatcgtggagatcgtagaggcgctggaacggggcgtctggatcgagaagtcgccgcatccggggctcatccggtacctgaagctgctgggggttaaggcggggagcagagaagaggcggggctcgtggtagaccccgagcgcggtgagatcgtggagttgcggggtgatgatcgtgggcaagctgtacgtggtcggaacgggacccggagacccggatctgatgacggttaaggcccagagagtgctacggcacgtggacgtggtggtggggtaccggacgtacgtcgacctcatcgaggagatcctaccggaagacgtcgagataaagcggtacggcatgcgggaagaactcgaccgggcgcgggaggccgtacggctggcggccgatgggttcgaggtggccctcgtcagtggtggagaccccggcgtctacgggatggccggcgtcgtcctcccgatcgcggtcgaggagggcgtcgaggtcgaggtcgtacccggggtcacggcggcctgcgcggcctccgcgctgctcggtgcgccgctcatgctggacttcgcggccgtgagcttgagcgaccacctcgtaccgctggaggagatactggagagggtccgggcggccctcgaggccgacttcgtcctggtcgtgtacaacccgaacagttccgagcgtaggcacatcttcgaagccttcgtcgacgtcctcgaggagatagtggaagaggacaggccggtggggatagtccggaacgcctaccgcgagaggcagagcgtcgaggtagtgcgggttcgcgagctgcgcgacctggccgacaggatcgatatgcggtccatcctgatcgtggggagctcgcggacccggatggtgggcgattggttggtgacggagcgtggttactcctcgcgcaccggccggaactccagcgagtagtagatcacaccgtcctcaccgtcctcactgatacggcggaacacggcctccaccggcgtgcctacgtcgatctcgccgggctcgcagtccacgatcatcgccgtaaccagcggtccctcctccagtttcacgatcgccacgacgtagggcgccttgtcctcgaaaccttccggcggcacgcgcaccaccgagtacgtgtacacctcgccccgacccgagagctgtacctcttccatctcgccgtcgctgcggcagttgggacagaccacacgcggcgggaagaacacctccccgcagttcttgcacctcgtcccgaccaaccggtacctgttgtcgatgctccgccagaagcggggtacgccacccacgacggatcccccctaatcggcccgctcgaagatatggacgaccacggtacctcccgaacctccaacgttgtgagtgagcccgatctcggcgccgtcgacctggcgcttcccggcttctcctctcagttgctccacgatctcgaccacctgggcgacgcccgacgcgcccaccgggtgtcccttcgccttcagcccaccgctcgggttcaccgcgacgtaatcggagtcgatctcgaacatcccctcgtggtacgcttcaccggcctctcccttctcgacgaagcccaggtcctcgacggccacgagctccgcgatcgagaagcagtcgtgcacctcggccacgtccacttcctcgggctccacacccgcctgcttgtacacggtcttcgcggcctcgaccgtggccttcagcgtggtgatgtcctcgcggtcgtgcagcgcgatggagtctgaggcctgggccgtcgcgcgcaccacgatcggcgtgtccgtgaactccttggccatctcgagtgggcagactatcacggcggcggcaccgtccgacaccggagaacagtcgagtaaccggagcgggtcggcgacgagcgggctctcgattacctgctcgaccgtgatctcgaactggaactgagccttcgggttcttggtggcgttgcgatggttcttcaccggcggaagcgccaggtgctcccgggtagttccgtactcgtacatgtgcctcctggcgatcatcgcgtaaagggcggggaacgtgaccccgtggaacgcctcccactcctggtccgccgccgtggctaacgtcgcggtcgcctcctccgtggtcacgtcggtcatcttctcgacgccgccggctagcacgatgtcgtacatcccggaggccaccgcaaggatggcctgacgcacggccaggccgccggaggcacaggccgcctcgacccgcgtacacgggataggtgtcagaccggaccggtccgcgatcaacgaggccacgtgctcctggtcgatgaagcgacctgcgctcatgttcccgacgtacatcgcctcgatctcgtcgcctcccatgcccgcgtcctcgagggcctccaacccggcctccacgaacaggtcgtcgaaggaccgctcccacagctctccgaacctcgtcatacccacgccgacgatggcgacgtcccgacggaaacgcacgcacaccatcccctcagaacttgagcttcttcttcatcttcgcgtactctccatacgtcacgtacacgcgatcctccaggtactcctccagcagcggggccttctcccggacctcctcgatacgctccgtcacgacgaagctgaacgcgtcgctacccgcacccgaaccgtacgagacgaccaggatgcggtcacctggctcggcgcggtccagtgccgccgtgaacccgagcagcgacgaccccgagtacgtgttacctactcggtcgacgacgatggtcggctcgacctgctcgggctcgaaccccaggctgcgcgcgaccttcctcgggaacttgccgttgggctgatggaacaccgcgtagtcgaagtcctcggggctcaagtcgagttcctccatcagtccacgggcagccctgatgatgtgcttgaagtacgccggggcaccggtaaacctgccgccgtgacgcggataaggttgcccttctcggcgccagaagtccggagtgtccgtggtgtacgagtaggtgccttccatctcggcgacaagcttcttcctcccgatcacgaacgcggctccaccggccgccgccgtgtactccagcgggtctcccggagccccttgagccgtgtccgcgccgatggcgagcccgtacttgatcatacccgaagccacgagacccgcgcacgtttggatggcagctgttccggccttgcacgcgaactcgtaatcggccgccgtgagatcgggcgtcgctccgatggcggccgctacgatcgtggcggtgggtttgacggcgtaaggtggtgactcagatcccacgtagatcgcacctatgtccttgggatctatctcagcccgtgccacggcgttcttcgcggcttcaacggcgatagtggcggaatcttcggtctccgatgggacgctcttctcctcgatcatcagccccgacttgatggaatcgacgtcatctccccaaacggccgcgatctcttccgccttaatccggtaccgtggaacgtaagcaccgtacccgacgatcccgacacgctccgaaggtatcaaccacgatcccccggctgaacttcggtaagctccttaagccttttcgagatcctcgaaatggactcggtagtcgtggccagattgataccctctacctccgcgatcttgattccaatgtcatccacctcacttttatcaataccatgtagtaccaccgcgctcggtttgacccccgccgccttgatggccaccatcggggagcgccctcggtcgatcctcgtgaacaccaataccctgttcgggcactccccgtacacccgaatgagggaccgtgcggggacctccagtatcgtcttcacactgtcgatcaccgtgtacccgaacacatccacgttaccgtgatggaccacgggttccgcctcgattgcttcatagacctcttcgagttttctcgggtaggggaactcaccgatgccgattaaggtgactagtaactcctcgctgaacaggacgttctcgagcgcggagacgatgttaccaccgcgctcctcgtcgatctctataagtgcttccacgaacttccgcacggtgtcgacccgaggggctttagtcttcccagtttcgtactcactgatgaccgacggtgacacgcccatccgcctggcgacctcgacctgtgaagcgtggaacaccttccgccacttcctcattaccttccccgggtgctccgacgcggcgatgtcgccgacgatcctttttagcacgaggctcctcggcaacgagatcactccccgcgggtgattcaagtgctcgacggaggactgacgctgttagtactcaccgccctggcactgttcagggagaggaagaagcggccgcaaaaggtctcggtggtgattccggcgtacaacgaagagaagactgtagctcgcgtagttcgggccgcgaaggaatgcgacctggttaacgaggtaatagttgtagatgacggtagtgaggataggaccgcggaagaggccgaagccgccggcgccatcgtgatctcgcactcggtaaaccgcggcaagggagaggcgatgaaaaccgggctaaaacacgcctccggcgagatcgtggccttcgtggatgccgacatcaagaacattcgacccgagatgatcgagaagatgatccggcccgtactcgagggggaggcggatctcgtcaagaccaagttcaagcgcaaggcgggcagggtcacgctcctgaccgccaaacccctactgaggttcttcttcccggaggtcgcgcacttggagcaaccgctcagcggacagatctgcgcccgtaggaagctgctcgagcgcgtcgacttcgagccggactacggtgtggacatcggtataatcctcgacgccgtagccctcggcgccaggatcgaggaggtggacatcggtgagatcaagcacgagatgcaacccctggaacgactccaccggatggccctccaggtcgtccggacgatcctggatcgggcccataagtacggtcgtgtcgtcctcaggtggaacgtcggcaaagcgctcaaccgcatgaacctgggcgtgtccctgctcgccttggccctcgccaccctgttctacacggagctcccgttggcgagcgtgctggcgctggggatcctgggtctggggatcgcactgttctccctggcccaactcgtctacgagctcctccgcgtcgagggtaagaagcggcgcatcctccgcccgttcctccacatgcacgcttccgtgatcatgtcgttggcggtcgtcgccgtgctcgtcggtgcgatgttctcgtcgatacagatcgcccacgaccgcgtcgaggtcaacccgctacccaggaaggtcgtctggggagaacgggaggtcaaagccgaaggtccgtacgtggtgcagtacggtcgtgagttgaagatggggaggaacgtcctcaaggtgctggacctgaagcccgacgatgtcctcgtttaccagcggggggagtacagggtcgagagcgcgggccgtgataacctgctcatggtcccgactgaactggctcgacagctcgggatcaagccggggaacgccacggactcggagatacggctggcgttccgaaacatcacggtcaagcgtaaggtggagggcccggacgtcaacatccgggtgaccgcggttctgtccgcgacccccgaccgcgccgaggccttgacggtgtacgtggacggtaagaaggaggcgtggattccggtggccaccaggggcggatccgtctacgtgtacgtctcggggtacgggctgataaagctggaagaccggagtgtcgtctacgtaggcaacagggagatcctcctgaagctcgaggacaccgacattgagacgctcctcctcgctccggccgagccgacacccttcgcggtcatcgagctcaagatgccgtcggtgagggcagtggtcgaatgagggagctcctcgccgtcgagccgagcccgggcgccgacctccgcgtatgcctcacgtacccgaacgagtaccgcggtatggcctccaacctcggattccacatcgttcacaggatactcgccgggatccccggagtttccgtggagcgttcgtacgtgccgacggacgcctacaaatccctcgatccgaaccgcaccttggtgagcctggaaacgggctccccactgtccgagttcgatatcgtcggtttctcgctacagttcgagctcgactatccccacatgctcgaggccctggtcatgggtgggatccccctcaggcgcgaggaccgcgacgaaaacgacccactggtgctcgtcggcggcccctgtacggtgaatcctaaaccgctggaaccgtacgtcgacgtgttctacgtcggggaggcggaagcgggtctggaagagggtatcgaagccatcctgaccgcccgcgatcgccgcgacgccctggaggagctggccgacctcccgggtttctacgtcccggagtaccccggcaccgtcgatcgagtgacggtgaacaatctcggcggaacggagcccccgaagatcgccttcgccccggaagacaccgaacacaccggtctccgcgcgtaccctgtggagctggggaggggttgcccctaccgatgcgcgttctgcctagggggtttcaccgcgggacacatgcgccaccgtccggtcgagcaactcctagaagtactcgaggacgtcgagaagtctccctacgaccgcgcggccatgatttccccctccccgacgctacatcccgagttcgaggaaatactggaagaatgcctcgagcgacatctcgaggtctcactaccgtccaccaggatcaacgacctggatcccgagctgctacccgaactcagggaagcgggcgtcagaacgctcacgttggccccggagtcggggtccgaggacgtcctcgagttcctgaacaaacccctgcatcgggatcacctcctcgaactcgtggaggacgcgggaagactcggtatgcgggtgaagctgtacttcatcgtggggatcccgggattcccccccgaggaggacaccgtggcatcggcgcggctggcccgcgagtgcgcggaactcgccgacgtccgtgtcagcgtcaaccccctgatccccaaggcctgcacaccgctgcagtactccgagatgctgtccgcacgggagatcaaccgtcgataccggctgttcgagcgggaattcaggggacgcgtatcgttcgaagaccccgagttagcccgcgcccagtgtctgctgtccagaggggacgtggacgtctcccggatcctagaggaagtactgtggaacgctaggagtccaggggcgtgggcacgtgcgatgaggtctcatggtgtctcgatatcgcccgaccgaccacccgacggtcccgaagacgtcccctacgacttcgttcgagcgggaccggaccacgaggagctttaccggctcttcacgtcacttcagtgcgctcccatgaaatgagtcacgagacccaccaaccctccgatggcggcggtctcgcacccgcgcaggatgaggtccttcttcctctccttacagagtcgtcccaggtagacccccagcaggaacaggaagatcccggagacgcacgtgcaggcgatcacgctccacttcggatccttgatgatcagcaccgggagtatcggcaccatggaggccatgaaactggatcctccgtgggagaccacgctcgtgtagatccggatccgagccagatcgtgcacgcgggtgtgttccagaccaccccgcttcattatcatttgacgctctagttcccggatctcgcgcagttcctcgatcttttcacccagataagagccgaacccgttggagagggcgagcgccaccgccacgctgagcccggcgctcgccgcgtcctgcgccgaaccgccacgggccaccacgctgagcacggcacccatactcgccagtacaccgtccatggatcccaacgccatgtagcgcccggtcgccagagcctccttaagcaccctcctcagcagctccttccggttcaacggtgacactaacccttagtcgtcttgtggtgtctttacctcctcgacgatccgagatccggctaccacctcgtctatgctgtggatggcgcctcccatgtcctcgatcaggtcctttatccgctcgaagtcaagatccggtccctctaccgtgaccttcacgttctcgacgtcgcggtccacctcgaccaggactatgttgacgccgtcgactccctccagcttcgccagcgagcgcgccagctccgtggtatcgggttccatcggcttcataacgtccagtaccaacctccggatcttagccatgggagacccccttcggagagggtgatggagtttgagcacgtggcacccacgacctggacccatcccggcagccatgtacacgcttcgggatcttctcgcggatgccgtggtgctccacggacctaaaggatgttgcttccggaccgcacgcctgctcgagaaggacggcgtccgggtgttcgtgaccgggatggaggaggatgacttcgtgttcggggccctggaaaagctcgtcgaactcctcgagtacgtggaggagcgcctcgaaccggagctgatcggggtcgtcggaacgtgcgtctcgtccatcattggggaagacctcgaggccgccgtcgaggaggcagacgtcgacgcgaccgtcgtcaccgtcgaggtgcacaacggaatgggacctaacaccgagggggtcatcaggaccttagagcgggccgcggaggccggggtgatcccagaaggggaggtggaacgccagaagagactgatgagggcagcggccgagctcgagcgtaggcgcgggatggccagtcgggagtacctcgaaccgtggtccgggcacgatccgtccgaggtcgctcgggtactgctatcctccgaggacgtgctcgccatcctcaatgcgaagaaggagaccgcctacctcttcgcggaccccgtcctcgaagtcggtaagcgtggggcttgggtcctagccaacctatccccggagagcggtctccccaaggtacggcgggatgcggaggttatcggatcaatttttcgggaggaagggatcgagttcgaagtcaccggttccctggacgagtacgcggtcaccggcgagctcctggccgagaagatcgaggagttcgatcccgactccgtgctgatcaccgggataccccatgccgtcgcgccggaagagctcgacgtcgacgccacgttcgtcgccgtcaccgacgggctccgcgaggcctccgccctgcgggagctggggtacgattacgtcgtcgtcgaggaggaagcccacgcccgggtgctagggcggcgcgagatcgtgccgtccgacctcggggaggccatacgtcagctcagcgcgtagtgcgacaggacccccaacatcaggcatgagccctgcagcacggcatagtcgcggagaacaccgcggctccccgcggccctcaacgctatcaggttggccacggaggccaccggcgtcccgtagccgccgaccgttacaccgtggagcagatccctccagtcgtccgtcatgggcaccactaacacggtagtcggcacgttgctcacgacctgggacagcaacacggaccacacgaacgggtcgtccacccgcgggttccaacccaacgacccgatcacgctcggaaccaatactccgaccgtcagcaggccgatcacgacccagtccacttctcggacggcgtgcgggcggagaacggcgtagtagccgaagaccgcggggaaccagaagtacaccgggacgtgagccagcagacaaccggccgccgcgatcaccaccgccacgtccaggacgttcggagccgacccggagcccgactcgacccgctcaccgcgaacccacgcgtatagaagaccgggcgccaggagcgccgcgcataccggcagctgcgtgacgaagaagtccacaggatccacgcggtagtgcgagtagatgatggcattctgcgggttcccgagcggcgtcagggcgccgaccgagttggctgaaaccaaagccgggaggaccacgcgatggggtcggcggggcgcccggagccagcagcgacaggacggtgatgagggcagcatcgttcgtgaggaacatggacagcagcccggtcactagcatcacacgtacggtgcccgctctcttcccgagtaccgcccttctaacccggtgaatcgccccggtcctgatccagtccgcggtgaccgccgactgaatcgtcacgaatccgacggcgttcaaatccacccacaccgacacgtccccattcccccgaaaactttaagtaatcgggattcaggtgcggctgtggacgcggggacgccccggcggtgtagctcggtcaagggcccgcgggtgaccgcgggcccgccgatatcatgcgggactttcgaggcccgtccgggccggagacatcccgcgacccgggttcaaatcccggccggggcaccaaaccgacaatcgttacgaggaaactaacgatcggggagcgccctttggagagatcgctcctcatcaaaaccattctcggggccgtcgcaggggcgatagcgctttacctcaccttgttccacctcgcggacgtggacgaggtcctcagagccctccaacgggccgacgtcgcttggatcctggcggcgggcgcgtgcgaggtactgtggttcgcggcgtgcgtggaaggatggaagaaaaccttcgagccgttgggcggccgtccatcccgaagacagctcttcctgatgtactgcgtcaaactgatggtcaacaacctgatttccctcgccagagtactcggcgacgccatccgggtgtactacggaatccgactcggatggtcggcggctaccgtcatccccaccatcgtagccgacatcgtactgggcaacgcgggttatctggcggtgatcctgctcggatgcgccatcgtgtggtgctgcaccgaagtctccccctacctgattgcggcgaacggtgtcggcgccgtggccgtggcggggctctgggcgctgttcgcgtccgaacgcacgtgtcacgaggcctacgagagcgtacgcgacctcgtcgaagcgctcgtacgccgcgtagggtactccgtcggaacggtcgatgagctcgtggattccacggtgcagctgtttcggtccaaggaagcgcgattggctttactccagtacaccgtgggatgggccgccagggtgctccggttgtactgcgtcacctgggcggtctggcccacggcgtccccgttgatcccgttggttatgtccgtcgcgatccgagggtccgccgtcgtttcggtttcgccgggagggctcggtatcgtggaaggactgaccaccggagtcctaaccgtgttggaggcggatccgagccgggtgatggcggccctgctcctggaccgtctctactcgttcgtgatccccgtggccttgggggccgtcagcgtgcccgtgctggaaaggtacgtcggtcgggggtaatatgggtggaactctaccacgaggtgatcatgctcaaggacatcgcggcgttggccgacgtgcacgtgggcgtggagatcgagctccgcaggcgtggaatacgggctgtggaccgtaccgaggaccgcgtggagaagctccggagatgcctcgaggcgttggacccctcgatcctggtgatcgtgggcgacctcaagcacaacgtaccgttcgccagtcgtatcgagttccggggcgtcccgaaactcgtggacgccgcgctcgagatcgtggacgaggtgatcgtggtcaaggggaaccacgacggcctggtggaggagctcctccggaatcagcgcggagttcgggtcgtgggcaccagagggatcctgatcgacgggttctacttcctccacggacacgcggaacccgatccagagttgctctcccggtccgacctcctggtgttcggtcacgagcacccgatctcggacgccgttccgggggtttcggtgaaggtactcgtcgagctggagctcgacttcgaggagctcacccggggcgaggtctcgggacggggcccggggttcgtactgccggcgttcgacgacctggtgggcggcaccgaggtgacctcggacgaccggttactcctcgcccaccggcgcggtgccgtgatcgacgaatcgtacctccccattccggaggcggaaccgttctgagggctcgcccccggaagttctcctcatcggcgcggccctcgggagagggcgcggatggtcacggcccggccggtccggctgcggtcctttttttaacggtgtcccctgtccgcgatggggggtcgcgaaggttggcgaaggttcgggtcggagtcctgggcgccacgggtatcgtaggtcagcggttcatcagcctgctggccgaccatccgtggttcgagctcgaggccgtgacggcgtcgccgcgctctgccgggaagacctacgccgaggccgctaagtggtacctcgaggagccgatgccggaggacgtggcggagcttaccgttctggagaccgacccgaaggaggtggagcgcgaggcggacgtggacctggtgttctccgcgctaccgtcggacgtggcgcgcgacgtcgagccggcgttcgcggaggctggcttcgccgtcgccagtaacgccagcgcgtaccgcatggaggaggacgtccccctggtggtgcccgaggtcaacccggaccatctgggactgatcgacgtgcagcgggacgagcgggactgggacggtttcatcgtgactaatcccaactgctcgacgatccagatggtcctgaccctcaagccgctgatggacgagtacgggatcgagagcgtagtagtctcaacgatgcaggcggtctccggcgccggttacgcgggcgtaccctcgatggctatcatcgacaacgtgattccctacatcgagggcgaggaggagaagatggagaccgagaccctgaagatcctgggcgagctggacggcgaccgtgtcgagttcgcggacgtcaaggtctctgcatcgtgtcaccgagtgcccgtgctggacggtcacaccgaggcgatcttcgtggcgaccgagaaggaggctgacccggaggaggcggcggaggttctggccgggttccggggagtcccgcaggagaagggtctaccgagtgcaccggagcgtcccgtcgtggtcagggaggaagaggacagaccgcagccgaggttcgaccgcgacgtcgacggcggcatggccgtggtcgtcggcaggatccgtaaggacccggtgttcggcggtctgaagtacgtgtgcgtcggtcacaacgcggtgaggggtgctgcgggcgcttccgtgctgaacgccgagctcctcgttgaggaaggctacctgtaaccggctagcagctccgccttctccacggcctcctcgggtgattccgccccctcgatctcaccgcgcctcgccagctcctcggcccatcctcccgatgacgtcaggcccacgacgggcttccccatctttttggccagggagatctcggagagcgttccccagccgcccgcgacggcgatcacggcatctcccgccctgaccaccagggcattccgtgcctcccccagacccgtcgggatgaccacgtcgacgtaggggttagcctcgtcccgcctctcaccaggtaagatacctacggtgatgccaccctcctcgcgcgctcctcggcatgccgcctccatcacacctcctcttccaccgcagaccaggacgtggccccgccgggcgatctcacggcccagttcctcagcgagattcaggacgtcctctgaggcccttccgctcccgatcaccgagatctgcaacggggtcgttcccccgcaaaggagtttttgcgagggtgacgacctcagctggcgtaacggtccacatcggaggctgcctccggccaaccgggtgctcgtcatcggtcacggagttccgggatcggtcccgggaccccaagtcatccatacggtcctctatcatccgtttcctcatctccctggctcggtcggggcgcagccaccccatccggacgtcggaccaagccgatgtcgtcatcgccgggggtgttccgagctgctggacgagatcctggagcgcgtgagggaaagggttgaggagattcgcgaccgcacgttcacgccgagagcgggaggaagatcgctacggaaggcactttcgggccccggcgtgtcggtgatcgccgaggtgaaacccacctccccctcccagggcagactacgcgacgtggacgcggaagacgtcgccgagcgggcccgtgcgtacgagcgaggtggtgcggcgggtatctccgtgttgaccgagcccgagttcttcgacggtcggcctgagtacgtcgaggtcgtccgggaggccgtggacgttccggtactccgcaaggacttcataatcgacccggtgcaggtggaggagagcgcgcactacggggccgacgccgtactgatcattgccgcggccgtaggtagagaggctcccgaactaatcgatctggcacacgaacacggtatggaggttctactggagatcgaccgatgggagcacctcgaactgctgagcgagtgcgatcccgacgtcgtaggggtgaacaaccgggacctccgcacgctcgaggtggacctgaaccggacgctcgagctgggtcccgaggttaaagacctcacgaacgcccccctggtcgccgaatccggtgtttccggacccgaggacgtcgtcctgttgggtgaggtggccgacgcggtgctggtcggtacgtacctgatgcgtgcccccgacccgagcgaagcggtaaggaagctcgtggaagcggggcggtcgacggagtgatcgaaccgtacaagctggcgtggtcggttgttttcggtatctccaggggtctctacgtgtttgcggggtcgttcatagcggcggccctgtaccggtacgtggcggaagagcggataacgatgaccacggccatgttcgtgggcctcatcaccgcgggcttcgcgtcgggtccgcagaagctggcggcactggccatcagtcagcccaacgtcgaggtgctctcctggacgatcgcagccctgttcgcgatacccgccaggacctacggggacgcactgggtaagcggctcctggaggcgcggctgtcctcgatgaagcccacgaccaaggtatatcggctccccgaagacccggacaacatcgaggacgtcccgggagaacccccggccccccgggaggtgaagaagcggattgcggggcgtgagtacgagttcccgcggggaaccccacgggaggacgtggagcgggtgatcaagcgggacctggaggaagagggaggtgtgggacgcgcggtggtgcgcgtcgacggggacgaggtcaaggtgaggctcgccggcgcgaagccgccggtctcgcacacgctccccccggacaaggtcgcggtttcggtgaaacccaagggtggatcggcccacatcggcgaaggggacaaggtgatagtgtacgccgacggtcagaagctctgcgaggcggaggtctggaagcggtccaagagcggcgtggtcttggtggtggatcgggagcacgcggacgagctcatgcgcctggttaccaagggcaaggacgtatccctcgtcgtggagcctactgaggaatgactgtgccccgcggttagccaggccggtcatccgtcgccttccggtcgtcacccgtcccggccccagcctggaccgcggggctcatcggcggcccctactccccctcatcgggagtcaccctcaggttttcggggccgtcctctcgtgggtgatcgccgggcatccgggagttaaccctttcgatcagaaggggtctcgatcggggtagtagctcctgaaccttcggagggcctcctcggtcgcctcggggaaacgccgacgtagctccttcacgaactccccacgcgttctccccgggatcagccccaatatctcggagacaaccctcaacgcccgatccgacggcctcctgggtacttccagggtgagcgtgagcacgtccccgaggatgcgcttgtgctggcgtggaacggagcccaggagcaccccggcaccgaagtcgaccaggccggggactccaccactccgccgctccgcggtcaacttcctgtaagccctcggccgatagcagtggagctccacgtaggtgtcgaacggtcgaaggtcctcgactacccgtcgccaacgggcgccgacctcggagcggtggaacgacggatccaccgtgctcacgtaaggtccgttctcgaacaccctggagacccggaacccttcgggtagtaccctacgcaccacgggctcgagggcacgaccctcgtccccgtgaaccccgtacactgccacgggtctgcggatggggtggtcgtttgcgctcatggttcccccacgccccgacggtatccgttccggagatagaaccggaagaggccctgtcgtaccgagacgagatccgaaccagggtcagatcctacgccttcgggctggacgactggcgggcgaaggtaaagacgcgtcgcgcttacctgcgcaaggtcagggacgaggacgagtcggagatcctgcgagtctacggggcgttactcaccgtggcggccgccggaccgcgtcccgtccgtcatctgatagccgaaggcgagtctgcgatggccgagaccgcgctctacgcccttcgccacgaggatgagtccgcaatgtcctaccccgaggagcgtgttctcagcgacctgtacctgtgggacgtacgggtactcgagcgcgacctgggtctgtacgccgtccacttctcgtttccactcatacaccgatccccggaaggacagaagctgaaggtgctggtgtgggaacgcgcctctttggagaaggtactgaaggaggtcaggtcgaacagggtcctcggagtgagggttctcgatccctcgggatggaacgacgtgtggatatgcccgcggtgcggggccacgaggcggggagggacgggagacctggagcaggaccacgcccgccggtgctccaactgccgagggcgaatgcggaagccggaccctaacctgctcgagatgctcaaggagccggaagggtacctgatcatgcacttcaagaccttggcccggacgttccgcgaggacgtccgtagattggtggtctcggatatcgagtcccgggacgacgtggaggacgaagagctgcgggagttctgcctcaaactgttcccgaaggttcggaagcgtctggaacgcgtcgagaagggggcgggcggccggttcccgccgtgtatccgggagctcttacggagggcccaagaaggggagaacttgccccacgaggcccgcttcgcgctggccgccttcctggtcaacgtgggatgggacgtggaccgcgtggtggaagtgttctcgaacctgccagacttcgacgaggagcgcacccagtaccaggtccgtcacatcgccggtgaggtgggcggaggtactcgatatctaccaccgaactgcgataagatgaaagcatgggggttgtgccccggcaaggattgtggggtgaagaatccgctggcgtactaccgccgacctagggccgacgacggatgaaccgttatgcggactggaggcaccccgagctcgtccgccaacgtttcgagcttctcctcgacctctttcacgcggctgccgtccttgccgatcgccttgtggtgatcgtccacgtacaccgtggcggccaggtaaccggcccccttgcccctggggcccctcactatcacctcactcacaccgcagtcgtcgaattcctcccgcaaaaatcgtctggcgtactccttcatccacttgagcctggtgtcctttctgggcctactccggagctctttggaccactcgcactcctcacattccagccgatcgagcgatggacggacaggacctccgcaccgtggacacctcagggacacttcagtccccctcctttacttgcttccacagcttccttaccctctcaacttcttcctccttaggctccgtctttctgagcttacgctcgactttcggaggtttccgtgttttcttggctttccgtgccttagccttcatcgaccgctgagagagccgtcgttcgaacttcaccaacccgtagcccatcatgacggccatgatcgccaatccgaccgcggtcgccagcgcgtagtacctcagttcacgcaacgaccgggtcagtccctgcaaccccgccttccgggtgcgcttcttttcgggtttttttcttctcttctcttttttcttcttagcttccccggctttcttcccagactcgaccttctgcgccttgccggccgtggacaccggctgaggttgtgaaaccccggcgtgacctcctccaccggtcgccgtcgtcgtcccaccgggtgccggctgggacggttggacggcgggagtcgcttgtccggtccccgtcgtggtacctccctcctgagcggcgaccggagccgccaggagggacgccaccaccaacacagtgacgatgtagcggatcacctctcgccccccttccacgccttcaggatgtcctcgccggtcaggaacggagcaccacgctctctcgcgacgcgctcggcttcttcacgtgggagcgctcctccacccggctccagcatctcgcatatgaccgctacctttggctccaagccgacgagttcgagtaacgtcgcggtgagctcggtgtgtccccggcgttcctccagcagtccgtcgaaggggcgcagcaggtgcacgtgccccggcgatctgaactcctcaccgaactcacgtacgggatcttcatggttgcgggtgaagaactccgccagtttccgtacagttaaggcacgatcctcgtcggtgaccccggtgaaggtgtctcggtggttcacggtgatcgagaacgtggagcgctcgtcgtacggtatatcgtcgggccacgtggcgcgcagtaggggatgatcggcacgttcgtagacgtctaccaggaagggtaagcgtatctcccgggcatgctccggatgtattaccacgcagatcaatccacccgcggtcctccggagttccgcgacgtgatccggcgtgacttcaggtgcccaaaacaccatatcggtttcaccttcacgatcctctgaatcgaaaatgaacacgggttctccacgtctcaacgcccgccggacggtccgcaggtcaacctcctcgctagcttccaagtcgacggtccccacacctcgatctttaccatatcgccatggattacgttgagctcacgtcgtaactccgtctcggatatcagctccacctgatcccggtgctccgtgaggtccggaaagaccagccacgcgggccttccgttcaccaagcaaggataaagccaagctcctccgtactcgccgtgaggctctattcggtacccgtatgaagacgcgagctcacggagcgattcacgctcctcgcgctctacacggacgttgaacgtccccgggaacggtcgcgccccgatcacacgttcgatttccctccggtaataaggaatactgacgtagcgacggccttcacccagtccctccacatattcacctacggccacgatcggtcccgtaaacacctcgcctcaccctctctacgacctcgtctacgtccgccgacaccccgtacttccgctcgaagaacgatacgaggttcttcacgtcccgccggagtgtctcaaacgcccccggctccttcactttcacagcttcggacaggtcgatgatatacggtacaccgtcgtcgcccacgaggacgttgaacgcgctcagatcgccgtgaaccagctcggcatccacggccaaccgcacgacctggtccagcagatcctctaacaccgatcccgggtcgtccagatccggcgctcggtagaggggttcgcccggaatgtactccatcacgatgaggcccggacgggcatcgtagggcttcggtaccctcacacccgcctcgtacgcgcgtcgcagcctggagaactccctcagggccgcatccccgcgctcgatccgtcgtacctcaccgtcctctaacctgtaaacccgctcctcgtgccgttcctcgtacccggtgtgcgcgcgatacaccttcagggctaccttctccccgtcacgttccgccaacaggacatccgcctcctttccggtcatgatcgtcccgagaatgcgatcaactccggcgtactccgccagagggtcaggctccgggatctcacgttcctcggactctgacaccttgaagagcgcatcttcgacggcctccagggtttcgtcagagatcctccctttctcccgctgtatccgcaacgcttccaggaaccgctccgcgtcttccggatctacctccgtctcctccagcgccctcaggaacggctcaggatcgtctttctgcaccgtttctaacagtgcacgtcccagttgctccaactccgaggcccccggtggtccctggaatcccgacaccggagccacgagggaacggggccttactccgtcaggtcgaggccctcgagctccccgacagtctccagcacatgcctccgagcctccttgggagacttcggttcccggactacctcaccctcctccacgaacttccgcagcagcggctcgcgttccgacccacattccggacagggactcggctccttaccccgagggagcacgacgtcgtccagacagttcgggcacctccagacttgtttcgctccggagagcttcccccgcttcgacctcggttcaccttcgatctccaccaggtccatcgcgaagtccaccgccggtgcgtccgagatcgccgtgcccacgccgaacgcgtcggctcccacctccgcgagccgtcggatctcgccctcgtccaaccctccggacaccatgatcttgacgtgctcgtaccctcggaggtccagctcccatctgacttcacgtacgatctccgccatgtcgccccggcgcgaggacggtgtgtcgagcctcaccccgtccagcctctccctcagctcttcggccgccatcagcgcctcctccacctcgtcgtacatcgtgtccacgagagctatcctggggacgtcctccggcacgtgctcgtcgaacgctcgccaggccttccgctggtccccgaacaccaggacgaacgcgtgcggcatggtgcccacgggccgctccccgatcagctccgcccccttgatcccggagaccccgtcgcacccgcccacgtacgccgccctgtccaccatcggggcgatcgccgggtgttgccgacggattccgaagctgtacaccggcttaccgccggccgcgaccttgcacctcgcagctttcgtggcgatcccggtggccttagccaggcacccgatcagcgccgtctcgagctcgcagaactcgacgtaaggcccctcaatcctcatcaccggctgcccgggtcggaacacctcaccttcgtccatcgcgtacaccgtaacgtcccgaccttcgagcaacgctagcgcctcttcgacgccgcacaggacaccccactcccaaccctccggtaacgaccgcgtggagatctcggcgaccacctcggtgtcggcgaggccttcttcctccagtacctttctgatcctcctgaagtacacatccgcggtctcaccgcgtcttatctcgtcctccgtggccacgtgaaggcgcactcacacgcacccccgcggggcatccccgcgagaatcgaaagctttatcctcacaccgtcggtccggtcggggcgaactgggcggaaaggagccgagagcgcgtgcctcccgtagctaggcgacccacgacacgggcttatcgaggggcgaccggagcgccgagacccttactccgacctcaacacccacgcagtccgaggcgaaccgcgacgggggtggtgacgatgtcgcgaaaggccctgatgccttgcaccggtatgtcaccgaacgggttcgtttcgcgggtggtggttgcggagctgtccgaggaggaagggataccgtcgatctgcccacctgctaccgccgccggtaaggagaagttcctcgagctcctgaagcgcgtcgaggtactggcggtcgcgggctgtgactacaactgtcccgcaaggatactgcgggagaaggcggggaaggaaccctccgagaccgtattcgtctcggacgtctctgaggagaccggtgtggacgctgacagtctctacgagctcacggaggcgaacagggagctcgttaaggaggttaagagaagggttaaggagctcctctgatagttccttccgccccctcgacgccccacgcctagtccgatctctccggggcgacaggaccgtcggatcgtcgaagtacgtggggtcgaggagccgttccccagaccgccgttgacgcgacggtgttcggtgttctcaatcaccggtcgggtttccctgccctcgccgtaatccattcgaatatttttatatgacaaagtagcatcgaaacggagattgttattcacctgataagggggaaactaaaaccacaacctccgctgaactggtgaccgaagagcctactcgccgttatcgggccggaggcttacccggaggacgcggaggagttcggcgtgtgggacggtggtccggtggtcgccggacgggagtgggagtgccgcgcgaggacgtgacgagcgacgcgagtatgtcggagcgcgagcgggcacctgtagagtccgcccttcctaacgtaccgctatctgcccgttcatccagttaaccagctccttccgctcatcctcgctcagttcttcgaacttcttgacctcgacgtcctcgagctcttccagcggtacctcagacttcgaacccaggtcgtagacgcgtacttcggggtctaactcgtccttgaaggtctccacgaagttctcgtagatctccatcgcgtgatccgggtagttctgagccacacggacgacggttccggcccccaacaggaccgtgaacgggtactcgtccccctcggatctcaccgcccggcccgccacgatcgccaggtcgtaaaggacgctctccagggcttccaacctcagggcgtcgagggggttgtcgtcgaaaacgtccttcggctccagtcggatcttatgtagcattatcggaacgatgatggaccgctgcgccgcgtagttggacaggtacgttcggcacaccaccatggcctcaagcccgtgcacgtcggcgccgacgagtcccttgatgatctcggctacacctatccctccaccctgccccgcgaactgctgcagatcctcgacgctccggatccgctcggcgtctcgaagggcctgatggaggttgtggacgaaggaacgggccctatccaggacgagaaccctacggtttctggtgtccagggcccggagcagtctcccgagttcccacgcgtcgtccgactttatgtacaagggcagtaggtagaagacagccctcacactcccacaccccggcggtccagctcgctcagggtgggccggttctcggccacgaggtacgccaccgggagctcgaagtactcggggcccatgagcagcttcagcagctgctccaggttcttcacgactggcgcgaacgtcaggatcggccgcccgcgacgcggactcttcactaccacccactccctgatcccggcttcctccgacctctcgatcagctcgttcagcagcgacaggttcttcttggcgtcgaggtagtcggccctgcactccctctcgacgagctctcggagttcctctatccagtcctcgagctcgtacgtcaaccggtcgtagacctctcggaacttggtcttctcctccagcgccttcttcaccttccggacgtcgcggttccagtccacgacactccacatgtgagactggtccagggccaggtccttcaactcatccatcagcgtgcgtgagccgactctcacgtaccccctgatctccactatgagcgctccagggagcacgtgggcgtcgtccaggaccacgagcgagccctccagcgcttcttcccagtcctcttcagacacgaacggttccttacccaacgcctcacgtgcacaacggtgcgacgcgtacaggaacggggccgacagcagcttcttgaaggagagacagacgatcctggccggctcacgtaactgacggatgatctcgcagttcccacaggagtcccagggagcgaaccccttgatgaacgggttctccctgtacagggccctgcggaccttctcccgtagctcctcgtcctccagcggtttcagcagcggaccctctttccggtaaaaccacgggtaacacttcggttcgtcctgcgccgagcccgcgtgtgccatgacctcgaagagctcctcctgttccaactctccgaggagctccggcagcttaacctgacacggttcgtcgtaatcctccaccctgcgccacagatcgacgctgagctcccactccttgaacttcttgtactcccgctccgctaggtccggtgacgggacggagtagaacaccctttcccggtactccctggctatcctccgcaataaccaggttttacccgacccgggccgcgtggtgagcacggccacgctgtcgcactcggccagctgatcgcggatttcttccaacatctcgtactgcgacttcctcaggtcgtacttctcctcgacggcgtccagagcttcgaacaggacttccttgtcttccccgcagctcaacgcgccaccccctcgacgacaccgagcaccgccggctcgttgcccacggtcaccaggaaccggtcgccgggctccaccaccacctcacggtccagctccaggacgacgtgcgccacgttgtggccctcggcgtagggtcgcagcacttccgtcccggcgtccgtctcgacctccgcgaacctgacattcgcggccgcggagagcacgtgcaccttccccatcgtcccgggccggaccttagcgccgatcgagagaacttccgcctcgatccggtcggcggtcgacaacccctccccgaggcacatcccgcgcgtgatcgagcccttcaccctcagcctggcccggaacggaacccccggcccggatccgtccgtcgattccacctccaacacctccgcgctccgtccacccggctggacttcgacccgcccttcctccagcgtaccccgatccacgatcccgaacacgtccacggtcgtctcgtccaccctcctcgtggactccaccggcgcccgcagcgggtccatctcggacggtcgaggtggctcctccagctcggccagcgcgtcgagcagctcttccgccccttcccccgtcttcgcggacaccggaacgggttccacgacggcttccacaccgagcagctccagaagatccatcacctcatccgcgacctcggccgcccgatcgcggcttaccaggtccaccttgctcacgacgggtagtactctcgccccgtagaacgagaccacgagcgcgtggtcgatcgttcctggacacggtccctcgtcggccgcgaccaccaggatcgcgtaatccgcgctccaggcggacgccagcatgttgcggatgtagtcacgatgacccggtacgtccacgaacgagaccgtggtatcgccgagctccaggaacgcgcgtgcgggctctatcgtgacccccatctcccgctcgtggggtagcctgtccaaccactcaccggtcagcgccttcacgagcgtggtctttccgtggttgaaatgtccgcagactaccacgttgacgacactcacgccgccaccctccagtcgctccactcgcccttgagcctccgggcggttaatcccgcgaatcgccttttatttaccacccccgagggcccggctcgtagcgccgcgcccaccacacggccagaaagcagcccgtgagcaacgccaggaccagcaaccacctcgggaagtaggagaccggggccgcccggtactcctgcgccagcacccgtccggtcctcgcggcggtcgacccggcatccttctctgcacctccggtgaccttgcccgcgacacctatcaaagacactcccgtaggtttcgccgacctcgggccgaccaccgctcccgttaccgccgcgacatgcgatactgtgaccgtgatccgggcgaccgccgggaccctcggcgccacacggacggtcggtccgaacgtcggacgcgccgtcggaacggttggaggtaccgcggtggccgtttcgatcgcctccgtcgccatccgttcgacgacctgagtctggaaggcgcatagttcggggcagcagcaggctacggaggtgatccaggataacacctcgcgcgggtaggggacgcccaggtcggtcgagatcctggcgagcgagaacgcggccgaggccagggccgtcggcaccgacgccaaccagtccgcgttagcgcctaccgccgaccagacggccgggagcacggccgcgaggtcgcgccgtccgatcgcgacgtacccgagggtcgcgaagcgcttgagcgagcgcagcaagtacaacgcgcccgagaccccgaaccggcggagcccggcgatgaagctcctgttgtacaacgtcctaagcaggctccgcacgaggtacgcccgggtcgagaccaacgggcccgaaccgcgctcgatctcccgtagcgtctccttcaggccgctcgccgcgcggaggagagtctccttccacccgacgagcctcgcgagccgaccggcgcttttggccacgttccagcccggtttgaaggcgccgagatcaaccttcgagacgtcgagcgtccatcccctgatggaattctcccgcagtaggtagtctaggagtgccctcgccgacgcctcgaggtccacggtgcagccgcagcagaagaggttcgagtagtcgtcgtacgagtcgaacacctgtaggaccgcgtccgaggtgacgaccgccagggccagtgcgagcgggcagtgtaagaacggttgccgcgtccccacgagctccgaccgcacgtacgggaggaccgtgtacgagaacccgacgagcgcccggagccccagggactccacgctgtcgcccgtgtacatgccggcctcgatcattgggagtaccggcgcgatgaactcgcccggacactgcgtgaagaccgcgacgcccgccatcaccgcgacgttctcccgcgtcagccccccgaggagccagtcggggagcctctcttccaacgcctcccggaggaccagatacgtgacggcccaatggagaaacggggcgttccgggacggcggaatccacaggccggtaccgacggccaccgaccacaggagctccgccaggttccacccgaccaggtctcgaagacccacgacgacgtagtcgttcagttccttcagtccctcgtgcagctcacggagcgtccccagcgggtcacgctccagcctcgtcagagcgtcgtcgaggagcctccggaggactcccggaacgcacccttgatcccggagtctctcctccgcctccttcaacgacctcttgagcgcctcgagcacgtccctgagggcgtcccaccgacccgtaccgtgaggcctcgcggtcggtgagaggtacgagcgctcgcccagtgccagggcgatccaaggctccgccgcgaccacatccagcatacgacacacgttgatcagcgagagcgcggacgggctgatcccctggaacgtagcccccgacaccagcaagaggacgtctttacggaccctgggcaggtcgagcacctcgacccccacgatccggaccgtccggaggtcgaacgtcaactcgcccacgacgactaccctctccccgacgcgcaggttcaccgggtaccggaacgcgaccgtgatgctcgcgctcgggtcgtactcggaccggaggactacggtgtgatcgtccaggatccgcgccacgatcccgctcacgcacgcgctcgtacctccgcacacagtgggcatggcgacgaggtcggccacgtccacgacgtcctcctcactgtacgatatcacgaggtccgagcacaacaggcgcacgttctcggcttcgaagtcaggaattccgagcacgacgagctcttgaccgacgctcacccgggtcccttccgggagtactacctccacgtgggccgtcccgtcgtccacgacgaccgtgggcctattaccgaggtaccggacctccgtgatccgaccgcggatcaggagggtctggactggcacgttcgggtgtcggacgtgcacgagcggcagctcccagggaaggacaccgatcacctcgccggtgaggttcgttccgtacgaggcccgaccggtcgtcgtgggaacgtagctccggaaggaagtcttcaccggcacgtacccgagcagttccagtgccagcgcgtactggaggccgcccgtggccaggtcggtcggacccatcaccgtcatcacgcggtcttccgcgtgccggtacagctcggtcgcgatcaccgacgacacggacacggcgacctcgtccgggaacctccgcacgtcgtaggcgcaggtgttcctcccggtcggggcgacgtagacgtaccggagcggggagccaccgaaccccgggcgcacgtactccgcgcgcagcgccctgaggaggttctcgatctcgtaccgggcgctgagcaggaaccgctcgagcacctcgcgggccaggcgcgagatccggtcaccctgtctccccgtccatacggcctcccagtcgacgtccacctcctcccacagcgcccgtcgtagtgcgaactcgaccatgcactcgagtgacttaaacgggtcctcggggtcgatcgagggcagaccgtacacgtgtaatccgcacatccccgactcctcctcgacctcccgtaagtactcgtacaacagctccgcacaccggtcgaagttccgctcgaacttctcccattcgtcggtcaccaccaggtacacgccggtctcgcggacgagctcgaggatcgcgtctcggagtgcgggggatcgtgactggaggtacttctcaagcgcctcgatcaatcgctctacctcaggatcgaactggacctcgttcctgggcgctgggaagtgaccgaggacgatcgcgccgagccgacgcctggccgtgacgcaaccggtcggatcccccacgtggtacaggcagactatcggcgtcccgttcgccaggacgatcggaaactcccagccgagggggaggatgggtttcatgggcgtccactcgagtcgacccctaccacctacgcggaccaccgcgtccgcgtcgaacttccgcgtgaggtagtaccagaacgccagatagagatgcgtgggtgggaggacactcgcccggagctcggtctcggatttcatccgcaacaggggcggttccgggagtacgataacgtttccgaatttcattcccggtatcgggaacgcgcgagtcccgtccacggtcctcaggaacggggactcctcgggcggaccccacccgaagagtccacccaactcgtccaaccgacccctccactcctcccacaacccgtccaactcgcgcaggacgggctccttatccacccgctcgccccgggacacccgcaccaacaggtccgtcaccctcgcgaagacctcccgtaacttcctcaccagggcctcccgggtcgcgtcgtcgaggttcatcaggtgtaagcacgagatcacggtatccatcagtgcctccatccttacccggaggaactcgaggtagcgtttgtcgggaggtaattcttcggggttggcccgctcgacgaggtatcggaggtacccgagtatcccccgttctacgtacaatcgcgtgggttcggggagggagcggtaccactcgaggtactcgtcgagggtgaccttgtcgaggagtagcaactcgacctcgtgcgcccgaccacccgcccgctcgacgaaccggttcaaaccagtcttgagcggtggcgttctcacgtacggacccacgtgataggccctgaacaggtattcgcgccagaaccggtccgaaagctcaagcagtacgttcagggcctcgcggaagatctcaatcgcctgccggaaattacctcgctcgagaagttcccacgcctctcggtccaactcgatgacccggcgcagcacctcgtcccacggtgtgtggaccgagtacccgtcctcgcgcaaccaagccagaaggtgtaacacgctcgcgggcacgtccagctggtccgccaccgccacgaagtcccggccggacgtgtcgaccccgtacacgagggccactctcttctcacggttcggagcctcccgcaaccggcgcagcttctcgaccaggcggacgacggcatcgatcgtctcctcgatcggtttgcctctgaccaccaggacgccaccggggacgtgtcgggcgagccccggtggtagcctgacgacgcgcgacgtcccgacgaggaacagacctaggaagccgaggttctcgggtgcgatcacgttgaacaccatgtaatggtcggcggcgcgttcggacatgtacaggcattcccactgcaacctcgtcatgcccatgtggttgctgtccagcccgatcaccgggacgttcaaccgttcgaacagtctcacgagccggctgtcggggccatagtaccgcatcatgctgtggttgacggcccacatgatgcagacggtgtgttcctctttgaccagcggttccaaggccccgaggaagtcttcgggcagcatgtacagagcgtcgtagtgcagggcgatgggtaccacgttgtacccgcgctcgtggagcttctccgccagcacgcgcagccaatcgaggtagccgaggtaccgacccaggaggttggatgagtcgaagacgatgaacaccgtcggggctccaggggtgtagaaacctctcgactcacccagtctccggtagcggtcgaagatctcgcggagcctgggaaggacctcgccgcggataagctccacgaaccaccgcgggtacacggtgatcccgtggtagctggacagtacctcgccgtgtgggaactcgcgctggtacctcaggatcacgatcgggtcgacgggacgatcgtaggagaccacggtatcggtgagcgggtcgtacagggatagcagaccgtcgaggtagaatgcccggggcggctctccaccacctacgtacctgaagaactggacgaggttacgctcggagagcgtggttaggaatagatagaggggaacctcggcacctccgacgttcatcacccgatccgccagtggtaccatctcggccttggtcgaaccggtcgggatgttgatgccgttctgatacacgtagaaggggacaccgcgcgacagagcctcggcgagagccgcgtactccggcgccgagtacgggtccagcgaggtcagtcccgacgagcgatacagcaccacggccgaggcattccggatgcgctcgcaggtctccttcctcacctcctcgaggttcgcaccgacgatgagggagtcgtacgaacgcgagtcgatgacgaagaagtccaccccggacttcgataacggttcgatgaactggccggcgtaacgggatatcaccactatctcaccgcaggaaaccggtgcgaacgacgtcaaggctgggagtaataatgagagaactagaaggggacgtggcaccggaggaaccccctcagcggcgtcgggtcaggagcgacgccgcgagcgccagtgccacgactgccggagtcaccgggaagatcttccgcttcttcactacgcccttgccgacgcccagcttctcggccagcgcgaaagccgccagcgcgtacgaggtcgccagtgtctggctccggtagcgcagctccgggctccagacgctccggatgaagtaccagtagaacggtagcctcaggcgtttggcctccaggtactgaccgtgcagtacctccagcgccttcacgatcgcctcatggttcgggtcgatgagacccaacttcgcgcacctgagcagcgcgaccagcgcggaggccgtgctaccgtagtccggcgggtactcgctcagcgatccgcggccccacatgcccgtctccgggtcccggagcgagagcaggtagtcgatcgctttcttgagcgcgttcttcacgcgctcgaccaggtccttcagctcgtcctccttgcccgcccgctgcacggcctcgagccagtcgcagagggcgatcatggcacgacagtgtccggtcgtgtacagcgggtacggacaacccgtgtcccgcgggtcggtgtagaagttgcccttctcgtcctggttgttcaggaaccactcaacgaccttcaggatcagctcgtcgtccggagacgttccggccgccagcagcatccggaggcagtacgaggtcacgtccgtgataccgtgagcaccacccggacggtccgggtagtcgatccagcagtagcccttgtcctccttctgcaggttcggaccctcacggagccagttgatcaccttctcgaggaacggcttgtactcgttccacttgtcgtccgggacgatgcccgcctgtctagctcggaaaaacggcagcgcgaactttgccgtcagcccggcgctcgggatctccttaccgtccttgatcctggcccaataagcccactctccgttggggtcctccttacgctggtacttacccttcacgttccacatgtactggagcgccttcaggaccatgtccttgtcgacggggtaccctacctcgaccgccgtcagcagggtgtccatgaccacgtatgtgtgcaggttcggcaggcagtagtacgtaacgtccgacttgtacgacatcgggaacgcgccgacgtcctccggctttacctcgtaggtcgccttttgtccactgcggtccttgtactcgatcaccttgcccacgtcctcctcggtgtactgctgcgacttcagccagtcgtgggcggccctggcgcactcctggatctgctcggccgtgatggcagatcccggggcggtcgagagggccacggtgacaagggcgagtactaacggtctgagaattcccatgtagtattaccctcactcgctcccatgttattaccaaataaattttatcgacttatgtcctatctcgtactaatctccatatgatacccgctgtcataagtaatagtaatatcgccgcggaaacagcgccgagactcggatggcaggacgcctcgaagataccggtagagacgaccggcaccccgatggtatccgcggcgtacccggccgcgaccgcgcagagggtgattccgaccaagtaagccgcgacgatccttcctcccaggaaccgtaggataacggatagcgtggctacgttggtcccgggtccggccacggtgaacgtcagcatcgaacctacggaggctcctttcgccaccagtgcggcggctatggggatcgcggcgaccgaacacacgtagagcggtagacttatcagagcggcgaggacgggcccgaggaaaccttcgaggtatcgtaccgccggactcggcacccatagctccagtaggacggaggccgccaatcctatcagaagccacggccctacggtgcccgatagctccagaagctcacgtgggaagtccttgaaggaacgtccccgatagcacggtccgtgttctccgcacgatgggagttcttccgtctcctcgcttcgatccttcagagtgagctcggccagataaccgactatcacggccgcgactaccgcggtcagcaccttggccgccgtgaagtacggtccgagcagcgcgtaggccagcagtagggagttcacgtcggtttgcggggtagccacgatgaaggcgatgacggggcctacaccggccccacggttcttggctgctatcgcgagcgggagcaccgaacacgagcagagggggagtggaactccgaggagcgtcgcgattatgcaagccttgaggccaccacgcagatgacgggcgaggtagcgttcggggaccatcgattgcagtgcggcccctaacacgagaccgatgagtaggtacggagaaatctccgtcaaaaggcccacgaacgctccgagaggatccaagcgccgtccccccgacagtcggtggttccgaagcgtacatacaaggtgggggccggtgtggaattcgttacgataattgtaacaatagcgaaaagcggggaaggaggaagctacttctccacgatggtttcctccacctccatcccgaagtgacggcccttaccttcctcggtctccacgtacgcgagcaccttgtcacccggcttgaggtcgaccacggacaccggctcaccgtcctcgcgtaccaggtgaatggtctcggcgttctgaactatggtctgaatctccacaccttcgtactccgcgcggatgagcatcagcggtctccgttcgatcttcagtcggcccaccaccgcggccctcgtacgtccttccgtgtcgactatcaggacctcatcgccgggtctcagctcggccaggtacttcgtcttcccaccgggcacgcggatgtaggcgtggaccggaccggcgttcacccggaagggtcgcggctcgacgtacgggttctcgaggctctcgctatgaatgaggaacatcccgcgggaggtcgatcctacgagcattccctcgccctcggacatgagcgagcaggtgtccacgcagaccctgtcgcccttacctatcggtttgacttccttcacctcgaccgcgacgagctcgaatcgctcggctgcggcccgctccgcgatctccgcggtcttcttgatctcggacggatcgatacgctccgcgtcgagcaggacgccgtccgaacccacctcgagcgtctcgaaggctatacgtgcctcctcggcgtcccgagctccggcgatgagctgcgtcttctcaccctgaagttccgcgatgaggttctccagtgggatgatcttccagtcacggccgatcgcgatcacgtagtcgggacccacgttcttcgcgatctccgcggcgaagcgctcgtaaggcttgtccaggatctcgacgtactcggcgacctcgaacccgcgatcccgcgccttctcgatgagcgcggcgtcgatagactcggatatgtcgtccggcaggtcgatagaaccgtctccctcgccacccttgcccacgatcaccacgtcggcgtcgatggcgtccagctcctcaagggctaggtcgggagagcccggagactccggcatcagcggcaccgcgaccttaacgttcccgagctccttcacgcgctctacgtcctcgggtaggcaaactatcacgtcgacaccggcttcgatcgattccgtgacgtagggcttcttctcgttccactcgccctcgaacgccaccgagacccagacctgcttgggccgcatctcgacttacacccgctccagctccttcatcgcttcctccacttccgcgtcttcatgtatgatcctcgcgatggcacgggtcattgcctcacgcatgcgtggggacttgtgcgcgaagatattacgaccgatggcagcaccggccgctcccgcctcgatggcgcccttaaccatctcgaggacttcctttggtgtctccgccttcggacctcccgcgatcaccaccggcaccggacaacccttcacgacctcacggaaggagtccgggtcgcccgtgtagttggtctttacgatgtccgcaccgagctcggcgcctaccctggcggcgtgcttgacgtactctacgtcgaactcgtcctcgaccttcggacctcgcgggtacatcatcgcgaccaggggcataccccaatccgagcaccgggcggcgatctcacccagcttcttgagcatttgaggctcgtcctccgcacccacgttcacgtgcacgctgacggcgtccgcaccgagccttatggcttcctctacccgggacaccaggaccttgttgttcgggtcgggtcccaactcggtgctggcggataggtggatgatcagaccgacgtcccgtccgtaaccccgatgacccgctctgaccatacccttgtggaggaggacggcgttagccccacctcgagccacggcgtcgacggtctcctctagatcctcgagacccgtgatcggacccagggtcaccccgtggtccatcggtacgatcagggtgcgtccggtctcgcggttcattatccgctccatccggatctgcttaccgatatgcaccaatccggatcacccctcctcgagcttccgggccagggactggtagcgtttggaaatgtcctcgaactcccgattgagctcggacaaacgtcgggatatcttcgagatgcgcgcgggagcgtcctcggtgagcacggcccccttcttcgaggggcgtatgatccctccctcctccaacacgcggagcgagtacctgaccttatgccactccatcccggtcacatccgagatccgaccgatcccgatgggttgatgctcggccacgacctccaggacttggacgtgccggcgcagggtttccagcgcctccctgagcgaccgcagcacccgcggaccatcccctgctctgggctgtcaagtgtcacgattgtgactacttaaaatttcccgtcggcaattcgaacggctttacctccacccccgcgtcggtcttcttggcacgctcgtacgccaacgccccgacggccacgtcgagaatggcgattccggtcgaatcgaacacggtcaactccgaggaatcgacctcggtctctcccctcaccacatccgagagttcgatgagttcctccgggttcagctcgccccgctccacgggttggctcacgtctcccgattcgacgcactgctcgcggtcgtcgaccacgaccaccgcgcgcttcaacagctcggtcttcacctcctgcttctccggagcgtccgcaccgatagcgttcacgtggacgtcctccggaacgtcctcagagcctaggtagggctcggtggcgggggtgcatgtgcagacgacgtcgacgtccagccccgagaagtccaaattgtcgagtaccttggcgtcgacaccgaggtctcgctcgacccattcggcgagccttcgagccgcctcacgtgcctggtcgtacacgaacactgcctcaaggtcgaagacctccgcatgcgtgaggagctggtacctcccttgtactcccgcaccgacgattccgaccgtccgcacgtcttcggctaggtacttcgatgctaccgccccggccgctcccgtcctcagcgatgtgatctccgtcgcgctgaccagacaaagtggcctccccgtttccggctcgatcaagcacatgaccgccatgaccgtgggtaagccgcgatcgggattgtcgggatgtgagttgacgattttgacgcctgccacacccagctctgacagataagcgggcatcactctgaagtcgccgccttccagcggtacgatagtcttcggtggcatctcgcactcgggcttgatccgaaacgtctcctcgacacgttcgacgacttctctcacgtcgagaagcgctctgacgtgatcttccgaaaggaacagcatggtagccccggtaacgtaaagactcgatcatgcctggaaatcgttttccggagtgctttgctcgaaagttcgcggtggttcggggatagcgctccatcaggttgtccgacggcgtcaccgggctgcggtggctggtcctgtacgtgcattgatgtagtcgcgatcagcaccctcgtttaaccactagtagaggggtagtcactactcgactccctgtatttcacgatcaccgtgatgagctcaggctacgggaccctcgttccccgcacggaggccggtaaactgtggacgatgacggtcacactgttgggcgccggcgccatgtgatggctcgtcctcgccgcggtcgaaatcggtgtgagaggcggacttcgcgagttcctatacgatatcgaccaaaggaggtggttacgggccgtgagggatcacgtcgtagtgtgcgggttcggacgcgtaggggcccaggctgccgggcggctccgcgcccacgggttcgatgtagtcgtggtcgacaccagcaaggagcgcgtggaacgggcgaggcgtgaggggttcggtgttccctacggtcgaggggaacctcaccgaccgtcggacgctggagcgtgcgggtgtggacagggccaggttcgtggtggtttgtacggactcggacgagaccaacgtgtacgtgacgctgttggtccgcaagctcaaccccgacgcccgggtgatcgctgtggcccgggacccggagaacgccgatctcctcccacatgcgggggccgatgaggtggtcgacgcctaccgggtcgcgggcgaggaggccgtggaacgtgtgctggccgaacactcgttcactgtgactgtcaggcacgatctcgatgaggtggagaaggagtggcgcacgatcgcgtcgagaacggcggtacgatcttggacgtacgtttccacgtccccgagtcaccggaggaacccatagtgaaggagcttccggtagagtcgcccgaggatctccagcgtcggaaggagttactaggaacctcggaggagttcaggtcgatggcggaggcccttcacgagctgtgtcgaggggcacattcacacagggtgttcgtcgcggacccgagcgataaagagaggatcgtgaaggaactcgagaagctgggcttcctgatcggcgtcgacctgtcccacgaggaggtattggaccggacctttcggaactaaaccggcggtgccagcgccagttcccgtctcttcttgaacacacccaggagttcgaagatgacgacaccgagcgtcgtcgccaagcccacaccggacaccaaaaaacccgcaggtcccgcctctgaggatcgtgcgatcggtgcgagcgaccacgagatccccttcgggcccagaagcacgtaggcctccagtccgtacgacttcagcgagaaggggaacatcgcgggaacaccggtccccgcccctttcatcccggctaaagcgtcacaaagtaggtgaaacgtgtacagggccagaacgagccccgtcctcagcccggccgcgtacgcggtggctacacccgccagcaacgcgacgggtgagtggagtatccaccgataccgaaggaggtgatcgaggtcgatcgccacgtttattccaaaggcgtacatcaaggacgtgcggacggggtacccggccgcccgtgccagtgcgtacgaagccgccacatggaacacggggtccaagggaactcccccgaggggttcgtgacttgtcggcgatcatgttcgtcggtacggcctcgaactccggtaagtcgttcttggcggcggttacatgcgcctacctgcgtcagcgtggcgtagacgtggctccgttcaaatcccagaacatgtcgctgaactcgtgtgtggccaaggagaacggagaaatcgccgtcgcccaggcgttccaggccgcgatggccggtcaggaaccatcgattcaccataaccccgtgctcctcaagcccaagggggagctccgctcggaagtcatcgtccacgggaagcccatcgggacgatgtcgtaccgcgagtaccgggagatcgtcttcgaagatccctggcaggccgtcttggaatccgcggaaatcctctcggaggagcacgaggtcatcgtcgccgagggggcggggtcacccgcggagatcaacgtcctggacaccgatatcgcgaaccttcgggtggccgaagccctgggcgcggacgtgatcctggtcgcggacatcagtaggggtggagccttcgcggccgtctacggcacgatcgagctcttaccggagcgatggcgacgactgatcaagggcttcctgttcaacaagttcctcggcgatgagtccctcctcgagccggggatcaaggagctggagcgccgcttgggcgtacgttacctcggcacagtgcgtcacgtcggggacttctggatgccttgggaagactcggaggcactcgacacccactcccccgggcgcggttccgtacggatcgcggtcatcaggttgccccgaatttccaacttcaccgacttcgagcccctcgcgatggagccggacgtgagggtggagttcgtggaccccagggacaacctcccggaggatgcggacgcggtgatcctccccggcacccgcaccaccatctccgacctcgaagaacttcgaaaacgcgggatggacgaggaggtagttcaggcggccgatgagggtactgtggtgctgggggtgtgcggcgggtaccagatgctcggcagggagctcgtcgacgagtcggggggcgagctcgacccgggggagtcggtcccggggctcggacttctcgacgccgtgaccgtgttcccgagcgacgccggcaaggtgacggtgcgatcggagggagtcgtgaaccatccgcacctccgcggcatccgcgtggaggggttcgagatccatgagggacggacgtacaccgacgaaccccacttggtccgtttacgatcagggtacggaaacagaggctgttttctcgatggagcataccgcaccgatcggcctgttctcgggacctacttacacgggatattcttcaaccggcgcttccgccacgagttcctcagatgggtatccgggggtaggtggaagccccccgagcgggacgtagttcgagaggcggtgaagcggaaccttcaggtcgccctagagatcgtcgaatcgacggatcttccggagctcctgggggaataagggtggatctcgatcggttgaaggtaagttccttcgagcgcgtaacccgacctatcgagccgaaggattcgggtctgatcacggaacgactggggttactcccgggccatcgcgtgttcgaatcgggcgtcggatccgggttcctcacggcctccatggcccggatagtctaccccgagggtgaggtagtcgggatcgagatcgataccaggaagctcgagaaggcccgggagaacctcgagcagctggggaaagtctacgaaaagagcgtgacgttgaagcacggtgacgctcgggagtacctcgaaggactggaagacgagttcgatgcgatggtgttggacctacccgagcccgaccgcgtactggaagtgggattggacgcccttaaatcgaacgggaaggtcgcggtgttctgcccgtttttcgagcaggtgagggccgtctggcaggttttggaggatcgatgcacctggctggaagccgtcgaactgatcgagcgaaaactccaggtggaaaagcgtgggattcgacccggtcgtaccctgggtcacacggggttcatagtcttcggtagggtctgattcctcatctcgggacggtccaccagttctcctggccttttcatgagccataatcagtcgggatgttcgaggtggggaagtgggtcagaaccgcacgcccgcgagtctcagcacctcctcttcttcgagcggttgaggtacgacaccttccgtctcgagcatcctgtgcgcaagctcgcggaacgcctctgccgcgtccgaatccggaaactccctgatcacggtacggtaccgcgactcagccttccgcacctcttccatgtaaaacagatcgtaaatcagctcggctcggattcgccggcagaactcggtcaccactctagaatccgagtctcgggagcgccggttatggataaccccaccgagtttcgcgccccctcgatcggcgtactcggcgatcccgcggcagatgttgttggcggcgtatagggacatcggttcactggatgtaaccacgaaaacggtatccgcgtagcctcggcggatcggtagggcgaatccaccgcacaccacgtcaccgagcacgtcgaagatcaccacgtcgacgtcctcgaacgcccccattctagtcaacatctcgagggccttcagcacaccgcgccccgcgcatccgaccccgggcttcggcccaccggactcgacgcacaagaccccgaaatcaccttcgacgatgatgtcctcgagcttcaggccttcccctttcctccgatactcgtgcatcaccgtgggaatcctacgtccagcgagcgtcagggtcgagtccgcctttggatcacatcctaccagcatgacccgataaccttcctcggccagggctgcggccacgttcgccgcgatcgtggatttccctatcccgcccttcccgtagacggcgatccttttcaagcgctgtcgccccacgatccggggtgagattcgtgaggaaggaaatcaccgtggtcgtagtgatcgccgttatagtcctcccggcggccgggtactacgaggtcaactacggacggggctcggtcgaacggcccgtggtgacttacggggaaactacgtggaggactgagcttcccaccgcggtggaactgtttaaggaggtcggggttgatccgacgaggttccacaggacgatcgtgacggccgaagaaaccaaccgagtggcggcggaggtcaccggacgtaggtacactccctcccagatatacagctgtgccactgtcacaccgtacgacgagccaccgcggcgctatcaggaggtcgaggggtaccgcatctacgtgggccccgagatcacggtgtgtaaaccggagacctacgccgaagccctggcgtcgataggcgcacctccctgctgcgtgaccatccgtagccccgttcgggccacgggcgaggcggccctcgccggagtgtacaaggctatgagggaggctggtgtggagatcaccgaccgcgacgccaggttctcccaggcggtgctcgaagccgtgaagggggccggggacgatcctcgaaggcgggcggcggccgtgactgtggtcgtagtgtgcgtgttccgaggtgccgacgatccgcagaaggcgagagacgttcaggacgaggtcgagaacgtctacggggtgaacctaccgcccgagaccgcggttcacgccgcacaggcggcgaagttggccgaggaaggggcggagtactcctggtggtggctcttcaagagactcctggcgtactggatctgacctccccgtcccgaaggacgacacctttagggcttcgcaaggacaacgtgagctcaccaggaagaaacaaagaaaaaagtgtttaagagacagttttggagtgaatccccaggggtaaccgatggcaaagtacgaaccggtcataccggagctcgaggtgaatcctgagggggaagtgagcaagatagcggagttcctccgggggaagttcgaggaggccggtcgggagatcgcggtagtgggtttgagcggcggagtcgactcatctacgaccctcggactcgcggtcgaggcgctaggccgggagaacgtggtagcgctgatactaccggagcgtgacaccccagaggaggacgttgaagacgccgtggaagccgcggaacggttcggtgtcgagtaccacgtccacgacatcaccgaggtcctgcgagccttcggcaccggttcatatgtcccctgtcacccgttcagccgcaagagcgacgctaacctcaaaccgcgggtccgtatgtgcgtactgtattatttcgcgaacgagctcgacggtctcgtcctgggtaccggcaaccgtacggagtggctcacggggtacttcaccctgcacggagacggcgcctgcgacgtggccccgatcaggcacctttacaagacgcaggtttacgtgatagccgagcatctcggcgtgccggagcgcatcgtggaggagaaggaaccctcggcgcggctctggcccggccagaccgatgagggtgaactcgggatcgattaccccacgctcgatgccctcctgtacgcgctcgtcgacgagggtctagggcctcggaaggccgtcgattggctcggggagcggggcgtagaggcgacggaggaggacgccgaaaaggtcctggaccttgtgcgaagttcctcgttcaagcgacggccggctcctggtctggacttgcccgagcccgaggatcctgcgatgtcggggtgaagagggagttcgagccgtatggagaaggtagtcctagagttcggatgtgagttcggcgcgcgcctatgggtaatccagcaggtgatctgcatcctcgtttcatcactagtgatacccatactcgcccaccacacggtccgcgccgtgcgacgccacgacctcgactgtgcgctggccagcttcgggatgctcctactgatactggccgccggcgtaatcacccctctgaacaccctcctccacctttattctcctccccgcatcaagtggggcatcatcctctggacgtacatcggatcgctcggagcagggatggtgacgttcggcatgggtatgttcaaagtcctcaccagacggcccgccgccccgttcgggggcgagaggagttgatcggcgcacttctcgcgtctcacagctacccaacagccgtgacctgggatattctcgcagaaatagccgagatactcccatcttcgatcacgatctcatgtacggatccagacatttgggaattctgcatcgagctcagggatcacgtcgaattcttggatgtggaagaggtggattcactcgatcctaccaccgtcgtcgcactcgcggaggaagaggcgcacatgggtcccaaggtgctgcgcacgcgggtacgtggggtcgtgatagttacggacgatcccgagcgggcggcggaggattggcgactccctgccgtcagtgctcgcgaaatctacgtcccagtggtgcgcgtcggagggaacgcgaccgtccacgtttacaggcacggggaggtattatggcgcctcgggcttagggagggaaagaccctgctaccacctgattacaaatcgctccgcgaactactctggaatgagttcccctacgtgaggaccataggctcgctggcccaacgaacgaactggcacgaggtcctcgtccgtctggcactgatcgaggaatggattaaaggaaacaaattagtgtccgaatttttagattggattccgaagagcaccaaggtgatccccaggagtacggattcacccaccgatagctcatcgggagaaaacctactcgagggccggctgatacttattccggcgttttcctccaccttaagcgccctagcgtgagggggaccctcgttgttcaagtccagacgtcttccctcgtttctgatagaaggcaaagtggacgaggaactggaagatttcacggatgacttcgggcaacctgatctggacgcgatcgtccgggcctgcgtggacagactcgaccctcatccggacctagaggaaagggtgttgaaaaccgcccggaaggcctgcgagcggatcggatttccgatgggagagcacgcggagttcgacctgtacccgtggctagccccgcagatattccacgagcgagtggtccgagacgtctactcgggtgagagtcgggaacccggcgaggcgcgggtggccttcgtctcggttcatcacgacaaacgtggcgtcgccgagtacgtgtaccggaccctggaacgtctggaaccagaggctgtgtgtttggaaaccagtccggctggactggaaaccgcgttccactacacgctctcaccgctcccgcacgccggaatcgaggtgatggcacgggtacccactaagatgctcatgggaccgttccgggacctctacggggctttagtgtactgtttaagggagggtgttcccgcgatccccgtcgacgtgccatcgtccctgaagctcaaggagtcgagaaagaatcccgagtgtctccgcgatcctatcgtgttcgagtacacctcggaagtcgaacgcgtcttgggaccgaccggcgagttgttcttccgcgagtacgaggaagtcgagcccgtgctcaggagactcggcggggaaatccgcaccaacgtctccctcgtggcctcggaaaccttcgtccgcttccacctggagttccgggagaggtacatgctcagccgcatcgccgacgtaaccgaagatttcgatcgtgtcgcggtggtagtaggggccgtacacacctcggcgatggagagggcttggcgcgagggcgaattccgatacctggaaccctcacctgaggacttcaagggtgtggagtgggagctctcacccaggtacaagcgtcacaagctcgtggtcgggggcaggcgaaggtgatcggggtcgtcgtcctcggagccacgggtaggatgggtcgccggatatgccggatggtgatagaagatgaagagctcgagctggtaggagctatcgcctcacccacctccaagcacctagggagggacgtggggctagtcataggagtgggcgagacgggtgtagaaatcgcccctccgaccgctttacctaacatcgctaaggacgcggacgtcgcgatcgatttcaccgtccgtgaggcgacattggagaacgcgcccaaagccgcccgtgcgggattggatctcgtaatcggtaccaccgggttcagcgatgaagacctcagggtgctcgaacacgagatcgaggaagctggagtttcggccgtgatctccccgaacatgtccctgggagtcaacttgctcttcgagcttacgaggcagctcgctagagtgctcggagacaacgggttcgatttcgagatcgtggagatccatcatcggcacaaggtggacgcaccgagcgggacggccctcgagttggcggccatcatagaggaggagctgggtaagggggagaaggtgttcggtcgtgaggggaacgtgggaccgcgtgacgatgacgagatcggtgtgttggccgttcggggaggtgaggtcgtaggtgatcataccgtcatggcgttaggcgagtacgagaggatcgaactcacgcatagggccctctcgcgtgacgccttcgccaagggagccttggtggccgcaaagttcgtcgtagaggcacctccggggatctactcaatgagggacgtgctgttcggcgggaagcggggggaaggattataaatccggaactccggctccggcggggggtgaaggtatgaggcgcgtgctggtggtcctctccatcgccctgatggctctggcggccccaggactggcggaagacaaggcggtcacagcgacgaccgagcagcagtcacagcaggcgcaaaccgcggagcagcagaccgagcagcaagctaccgcgccggcacccaagacggtgacgttgaagctgacgccgagccttcaggcggacttcaccgtggacctgaagaacggagaagcggtcctgaccctgaccggaggctactcgctggtcaccgagggccaggacctgctgtccgacgtcctgacggcggccctagcgggtgctattaacaccatcgtggcgccgatcgacggtaaggagctgctccccggcgtgaagctggaggccggagtggaggctccgaccgtgaccgcaggactaggagaggactgtggtgtcacactgacagcgacggtcctcaaggtcgaggtacccaagctggaggacctcgagcatgagtggagcgaaaccgtgaccgaggacccgctgaaatccggtatcagcgtggccctacggctgctgcacacggccgaggaaccgttcatcaaggccacgctagatctgctgaccggagcactgaaagtcgtcgtgcacctgttcgagctcgaggtcggcagcccgtcagaggactacgagggaccgtacctggagctcacaccagtgaacgtgtcggagaagctgaacgacaacgcgaccgtaaccgcctacctgggagcgagcctgtcagcgtcgactctgaaactgtcgccgacgatcacctacgagacgaccacaccactgaagctgccggtgacactgccggagatcacgctatacaccttccagctgccggcttaaagtaagtgatccgacaccttaaccggcttttattttattatgtcgatagttcgtctctactccttccctttcccccgacaaatccacaccactaacggagtggaaggcccactttttgggaaatcgtccacccgtcgtgaaggttttgggagggatggtcctcctcgtgctagttacattatgtggtggcaacaccagtaatggcggagacacagcagccgggttagcagacccaacagcaagaacagacggagcaaaaggcgggcagaagccaagattcatggaggtctccatagggctactcaagcggtgacggaaccgctcgcgaggctcacggccgaataaacgggatgctgaacgtcgccgtcgacttcaccaccgagctaacgagcgagacggtgaaggagggttcaacatcacaccggcggactcggcaacctaggcctgtgtttcaacgtcagcgcgtccggcggcctgcaagtgtcgctgaccggcacgtacacgctaccgttgccggagaagatcaccgtaccgaaggtcggcctacaagagatcgagttacccctgatgaggacgtgttacgtggagaggccccggatctccacgaccacgcccggtctgatctccactgccttcccctctcctcccttaacccgcagctcccactccacgtcgacgcactcctcgtccagcacgactttttccccgtcgatctctagcttcgccttcccgtcttccttgatcgctgacgcgacctcgtccgggttgttctccacgtactcgatgatgtcccgagtgagttccctatacttcgggccgatgacatccatccggggttcgactttcaccgggactctctccaatttcggctcgccgacttctacctcgacttccttcgccctggtggcgctcttgagatccgggatcgctttctcgaggctctcggccagctcttcgtcctgaacgtgtaccgtcagaccctcgaactccgcgcccatcctcaatccggcgtccgtcttcgccttcctcacctcggtcacgatctcgcggaggatctcaccgacttcctcgaccccctcgtcgatccacttctcgctcgcctccggccacgcctggtcgtgcacgctttcgtcgaacagtcggtagtagagctcttccgtcacgaacggcatgaacggagccagcaacctcaggaggccgtccaacacgtggcgtagtaccgctctggcggcttcccgtgaaccctcaccgagctcctcgggccggtacagcctcagcttcgccatctccaggtagtcgtcggccagctcctcccacgcgaactcctcgatggccttgatcgcgtcgttgaaccgataccccgactccaggtgttccgtcacctcatcgacgagtcggtggaacttggagagtatccacctgtcggcaggcgtcaggtctccttcgacttcttccaccgacggtgcgtcgtcgatgtggtctttggccagtcgacacacgttccagatcttcttcgcgaacctgtaaccgcgcttgatggtcttcgtcatgtactgcacgtctgatccgggcgctccggacgatacggcccagtacctgagcgcgtccgcaccgtactcctctatcacttcggtaggctcgactacgttgccccgagacttactcatcttgtatccgtcctcaccgaacaccataccgttgattaggatctccttgaacggttcggtgtcggcgtgaactaacgctcgtacggtcgtgtagtacaaccacgtacggattatgtcgtgaccctgcgggcggagatccaccggtaggtccggctcctcgtccggccaaccggtgatcaccaagggcgtaatcgagctgtccatccaggtgtccatcacgtccgtctccggttcgaactccgagcacccgcacttcggacactcgtccacgggcgggtcgtcccgggtgggatccaccgggagctggtccttctccgccgggatcacctcaccgcactccttgcagtaccagaccgggatcggcgtcgcgaatatccgctgccgcgagatgcaccagtcccagtccatcgactccgtccagtcctcgaggcgcttgcgcatgtgctccgggatccagaccatcttccgggcagcttccttgacgtcctcggccagctccctaaccttcacgaaccactgctccttgacgaggatctcgatcggggtcttacagcgccagcagacgccgacgttctgcgtgatcttctcacgcttgaccaggtatccctcctccttcagtgcctcgacgatggcggcacgcgcctcctccacctccatcccggcgaactcgcccgccacctccgtcatcttaccctgctcgtcgatcgccctcacgatcggtaggtcgtgccgcttgacccaggccacgtcctgcttgtcaccgaaggtacagatcatcacgatacccgttccgaactcggggtccacctcctcgtccgcgatgaccggaacctcccaaggagtgtcccggtccccgaaccgctcgtggaggggcactacgagcttcttccctacgaggtcactgtatcggtcgtcgtccgggtgaacggcgaccgccacgcacgccgggagcagctcgggtcttgtggtggcgatcgtcacggagccgtcgccgtcggccacggggaactcgatgtagttgaggtacgtctcgcgggttacgtactccacttcggcgaaggcgatcgccgtctcgcacctcggacaccagttgacggggtgctcctcacggtacgcgtaccccttctcgagcagctcgaggaacccgtactgactgcggcggatgtaatcggggtccatggtcacgtaggagccgagctccttcagctcctcgttctcgtagtcgatgcagtcggtccaccagtcgatcgagcatccgagctgtatcagctgctcccgcatcttccggatgttctctaaggtcagctcctcgcagagcttccggaactcccgcctgggagcgtcgcgcttcgtgatcccgtggatctcttctaccttaacctcggtaggcaggccgtgacagtcccagccctgtgggaagaacacgtcgtacccgcacatacgtttataccgagccaccacgtccatgtaggtccagttcagcacgtggcccatgtgcagctctccggtcgggtacggcggtggggtatcgatcacgaacgcaggtcggtcctcgccgccctcaaacctgtacttccgttcctccagccaccgttccctccacttcggctcgatctccttcgggtcgtagtcctccaccggcgcctcccccggcacgatcccgggagcctaaatatcacggttccggccgagccatccgacggggtgacggtgttgaacagtcacgtggtccactcgcccacctccaggaccttcctgctcttcctggcggcctggctgctcctgtcgtttttgatgatgtttctgtacttcgtgagtatccccgggttcttccacgccctcggactggaacccaggacagcgctgctactgtcactcctgtccattgtggggagcgcagtcaacgttccgatcaagcgtatacgtaagctggtcacggtgcagcacgagacctacgggttctggggcatctcttaccaggtaccggtccggcgctccgaggagatcgtgatcgccgtgaacgtcgggggctgtctgataccggtcgccgtctcggtgtacctcatcgccaccaacctagatctgtggctccagtacctgctggccaccgccgtcaccaccatagtgtcctacgccaccgcgcgggtcataccgggggtcggtatcgcggtaccgttcttcctccccgcggccgtggccggtacggtggccctgttgaccaccaagggcggcgccgccagcgtcgcatacgtggccggtacgctcgggacgctcatcggggccgacctactcaacctgaggaaggccgtgaattggggcagtgcgccggtcctcagtatcgggggtgccggcacgttcgacgctgtgttcgtgacgggtctcaccgccgtgtggatcgcgtacgtcctctcgccgggggccggaacgtgaggatccgggaagccgtgctgaacatcgacccgtacgttcccggcaagtcgaaggaagagatcgctcgggaatacggtatcgaaccggacgagatagtgaagctgggatcaaacgagaacccgctgggcccttcacccaaggccgtgaaggccgcgaagcgtgagctggaacgccttcacgagtacccggaacccctggcacctccgtccctgtacgaggccattatcgattacctggcggatcctccttatcccgccggagaacccgtggagatcacacgggagcacctagtcgtcggtggggacggcgccgacgagatcatcgacgtgctgacgcgcgtgctcgtcgacccgggcgaccccgtggtaatccccgtgcccaccttctcgcagtacggcatctccgcacgggcgtgcggtgccgaggtcaggaagcctcgcttcgacccggagcgcgggttcgagctggacgaggactcactgttcgaggccctcgaccgggaagtgcgtctagtgtacctctgtaccccgaacaaccctacgggtaaccggatccgggagcgggtcgtgagggacgtcgtggaggagtgccgcggggtcgtcctgatcgaccacgcctacgtcgagttcgccgaccacgactacacaccgctggcgctcgagtacgacaacgtcctcgtactgcgcacgtgctccaaggcgctgggtctggccggggcccgggtcggttacgggatagcgaaccccgagctgatcgagcacctacaccggatcaaacccgtgttcagcctgacgagacccagcgcggccgccgccgaggccacgttccgcgatcgggactacatcgagaagtccgtacggttgatgatcgagagccgaaagtacctgtaccgagagctccggaagttggatcggttaacaccgttcccctcggaggccaactacctcttggtggatgtctccaacactggaatgaacgcgtcggagttcacggaggagctcctgaagcgcggcgtcatagtacgcgactgctccagcttcgagggtatagagccattttacgtccgggtatctaccggcacgctcgaggaggatcgcaagttcatagaggtcgtgaaagatgtgctcgaggtgtgaacgcaacacgccgtagtaagcgacgccacggttcgtgcacgccgccgttacagcgctacagcgctccgagtgaacttagcgcactagttcgtcgagcagctcgcgtagaggcgtgaaacgtcgttcaggggctggagtgccgggatccggggaataccggacgttccggaggtcgacgaaccccagctcctcttccatcctctccttcagcctttcgagactatcgacccagcacgccgggaacctgacgtcgaacccgaactcttcgaacttctcggcccaattcagcagggatccgaccacgttgtaatgatcccgtaagccgatccgtttgaggttctccacggctttcccgaaggggatcaggggctgtacgaatacctcggcgggctctatctcggtgtcggcgagcccctgaggcaagtcatcgttgatgccgggaaggtacagcgaacggatcacggggcggtccgtgttcacggcgaaccgcagcgtcctctcgggccctacgccgtggaggcgccgatggacgtcgggatccgtgacgtcgatactcaccattaccaggtcacagatctccgacagcttcggggccagatcgggcctgtatccccgagtttggagatctatcctgtcgaaaagtccggtctctcggaccatttccaggacatcgatcagctccctcccgaggaccgtaggttccccgtactgggagaccgtgagacacccctggggttccccgtacagtcccggtttcacgaccacgcctacattctccgcgtagcgtgcgtagcagtgagggcacttgtacggacaggatgtggtcagctcgagcgtcggatggtggggaccttccccttcggctccgggacacccctcgcagtgacgtgacgtcggcaggcttaagcgcgtcacggtcgaggtcccccaaggggcttccggtgcaggtagtcggagtcggcccgaatccgacgaggtttctgacgatcgaggcgatcgaacggatcgcgcgggcggatctactgatcagtagtgagtcgatactccgagagatcgacggactcagggttgaggcggagatagacctctccgacaaggaggtagtcacctggaacggttccgttcgggagacgctgacggagtacgcggacagcgacccggtggtggtcgcccgaggtgatccgacctacatgggtgtcgggaggctggcgtcgttacttttcgacgacgtcgaaatcgtgccgggcgtgtcctcactgcaggcgttgacggcccggttcggtcggggctttcacgaggtcgaagcacacgtcaacctccacagcgaggaggacgttgaaaaggtcgtggagagcctaggagctggccgtaccaccgcggtactgttcggcaaggttcgaccggcgaaagtcgtcgagaccatcgagtcggtgggcctaaacgtaaaagtgatcgccggggagcggttgtggtacccggacgagcgtctcgctaccgaactgcactcgttacggaacttttctgagttcacggtggcgatcttcgagccggatcacgtgatcgaaacctcgttaaggtaacgatcacggtgtgaggggggaagagaccttggcggaagtcgtgttgacgatggatcgtacgctggccagcaattaccgcggcggtatgttcatggggttcagtgcctgcgtaccgaaggggatcatacccgactggctgtacttctcggtgttctgccccagcgtcgagtacgacgaggaaactggggaggttaaggaagcccccttgggcatacgacgcatcgaggcgcagctgcggcgggaaggttacgacgtggccgtggtccacccggatgccgttcacaaggccatcgacgaggacaccatcgctgtcggagtttccgagatagacccccaggggatgggtccggccacgacgactttcacgtccttctccggtaagccggcgtacatgaaggtatgcttcgaggacctcatggagagaatccgcgagctgaaggatcgctacgggtttggagtgttcatgggaggaccgggcgcttggcaggtcgccgagacgttcccacgcttcggggtcgacttcctgataatgggtgaaggggagtacgtggtcggagaggtcgtacgcaggatcgaggagggggaccgcggtctcgagatcgtccgcggtaagccggtagcggcggaggatatacccacgatcgtcaaccctactaccaacggaatcgttgaggtggcccgtggctgcggtcgtggatgcaagttctgcagcccggacatgcgcgagctcaggagtttcccgctgagtaagatcctggaagatgtcgacgttaacgtacgcggaggccatgaggagattctactccacgcggaggacgtgttgcgttacaaggcggacggatggcggcccaacgtcgaggcggtgctggagctgttctcggccgtgatgaatcggccgggagttaagcgcgtcagcgtgagccacgtggcactttcgacggtctgtcagttcgatgagagactaggagagatctctgaggtggcaggtgtaggcgagctcgtaccctggatgggcgcacaagtaggtgtggaaacgggcagcccgaggttgatggccgaacacatgccgggtaaggtggccccgtacaaggtggaggagtggccggacgtcgtcgagcaagcgttcgggatcatgaacgatcacggctgggtgccctgcggaactctcatcttaggactaccgggcgagaccgaggacgacgtcatgatgacggtcgaactcttggaccggttgcgggactacaagagcttcatcgtgccgttgttcttcgtaccgatcggtgaatccagactgagcgatcacgatttcttcaccccggagaaactcaccgaggtgcactgggaggtcatcttgaagtgtgtcgaccacgacctgaagtggttgccggagctgtacgaggagtacgctcgagccaacggacacgggccgctggtgaagctgacgatccgagcgctgacgtggtacggacgtcggaagatcttcaaatccgccctcaagtggtgcccggaaaaggagcttgtggaggcggtgttagggtagatggagtgccgggtgaaagtgttcctctgcgcggacggacgacccgtgatgggtccaggccggtacgcactgctgaaagccatctccgaggagggaacggtcaaaggagcggcggagcgattgggctggtcgtacgggtacgccaggcggagcatcgaggccctcgagagggcgttcggtcgcaaagtcgtccaaacggagaggggagggcctgagggcggccgggcttcactcacggacttcggtcgtaagttagtcgaggagtacgagcgggctatgaaagaggtccgcgagaagggcctcaagccgattctctgaggatgtccgctatccccttaacgcgcactaggcggtactccccttccctgaccaccggtttgtatcgagccagctccagtttgcgctccgtcgttatttcgtacaggttgacgctgacagtgctctccgagaactcgatcacgttgaaagagttcctactgtatccccggagcttggtggccgagaacgtgccggcgttcaccaccacggtgtcctccaccttcgccgcgaatggcacgtgtcggtgaccgcacaggactaagtcgacaccgtacttgatacagaggttgatcatctcgccggcatccacgagcacgttcctctccctacccgcgcccggtacaggaagcaggtgatggtgcatcgcaatacacttgcaggcgccgcccggaatgcgtcgcagggtctcttccaaccattcctgtcgttctcttccgagctggccgtaatcgacgtccggctccgacgagtccaaccctaccacgtaaagatcggccgagacacgctcaaccctgtaccgatcgccgaacacgtcttcgaaggtcatccatccaaggtttctcgcgtcgtggttacccgggacggggaccaccggagcttctatcttttcaagcagtgaggatacctcctcgtactctcggactaacccgttgtcggtgagatcgccggtgacgatgaccacgtccggtctgaggtcgttaatctgctcgatgccccgatagaatacctcggggctccaactctttctgtacggtgaaatgtgaaggtcggaaatgtgaacgattttggcgttcaatcacccttaccccgtgacttcaacagcttcaccgcccgcaccgggtcgccgttcgcctcctccaacgcacgtctcgcctcttcttccgagactccggcagcctccgccacgacctcgacggtctcttcctccggctcggactcactggtctcccgtaggatctcatccagatccttctttccaaggaggtactccgccagcttcttcttccaccacatgtactcctccgggctcattccgatgcgctgcagcgtcgagtcccgtaacggacacggcttggtgatcttacagcaccacactaggctaccgaaacacgtgttcttccccgagcccagcggagtcttctccgcgaactccttcttcctccgcacatattcctcggggtcgaggcccgcctcgtccaacgcgtgaaaaatcggacaaggttttacgggtgggcagcagaaggcgagcgcctccgggggtcctccacggcacacgtgcgacggggcgtccggccagccttccttaaccacgttcatatcgatcactcctgtcgaatcatctcttctcgttcctcgggtgtcagttcgcggacgatctcctctggatctcctgtcttaacgaattttccatcccgcatcagtgaagcacggtcgcaaaccatgagaacgaagtccatgtcgtgggagactatcacgaacgtctggttcatctccttcctagcgttcaggatcgatttcgcgaccttgcgcatagtgatcgggtccatggtaccagtcggctcgtcaaggatcagtatacgtggctctctgatgagtacctgggctagtgctacccggtgcctctcgccttcggagagctggtccgggtacttgtccaggatgttaacggccttcttctcgtcgaacccgactaccttcaggacgtgaacggccttcatcctggcgagctcgtccggcagctcgataccaatggccttagtgaggttctccagcacggtgcggtgcgggtagagcgtgtactgctggtgcaacatcccgatgtaccgcttcgcccgaccccgttcacgacggtcggtcatatcgacccagtcgtcacccacccgcacgtacacctcgccttcggtcggctccagcacgcccgcgaggatcttcgccagcgtggtcttgcccgctccgctctttcctacgattccgtagacctcggcctccttcacgtccagcgagactccgtccacggccttcacgacgccgcgctcgatcgagtagtagtacttcttgacgtccttgacacggatgatgtcatctccgacctccacctcctcccgctcgacctcctccacgagctccaggtacttgctgacgacctcggagggttcgcctacctccttcacgcacccgtcctccagccacacggccttgtcggagatgtcctcgatcacctcgggccagtgagacgtgatcaccatggtgataccttcttccttcacaccctcacgaagggccttgtgcacgatgtccgctgtctccgggtcgagggtaccggtgggttcgtccgccaggaacacgatcggcttcttcgccaactgtcggatcaacaccacacgctgcttttcgccaccgctcaggtctcgcgccaggtgcgtgatgcggtgctcgagctgcaccatctcgatgaggtccaccgcacgctggacggcttcctctcccgagtagcccgcctcttcaagcgcctccatgacgttctcgagaaccgtctgctcctcgtacagggcgaaggttcgctggaacatgatggcgatccttttacggaacctgcggcgctccgtgtccgagagtccccacagatcgaccacttcctcttccagctttcccttctcacacttcggacattgctcaccgatgaactccggacgctctatccagccgcactcggggcacattcccaccctgtagagaatgcggccctcgtcgggctcgtagtcgtccaatcccttcagcacgtggatgaagacggacttgcctgcgccgctttctccgaggactccgaggacctccccttccccgatctcgagctccggaatctccaagcggaagtcctcgaactccttgactaagtcctccacgcggattacccacgacaccgtcggtttccccccacttcgtcgccaagagacacctcaacatcttattaggttgtccgaacgagggggaggtccttgaaacctatccgggtatgcccggagtgtggcaagtacacggaaaaacatacctgcgagcggtgtggtcggcgcaccgaggagtttttggacgggcggcgaaggctcgcgcttagcaagctcctctcgggtatcctccggcacttccccgaagaggtgaaggtgaaactcgacgacgagggtttcacggactgcgacgtacacgagctggcggagcgcatcaagaagtactggaagaaccgcgagtactatcgttggctcactggcgagcacatcatcgcggttgtagagacctgccccaagggccggttcgagatcgacgaacatggccgtattcgggcgaggtacggtcattcgaggcgtctcagtgtcaggccgacgctcccagaagccgagaacgtcaaggaactgtaccacggcacggcacgtgagaacctggagtctatactccagcacggaatcaagccgatgggcagacgggcggtgcacctgacggacgacgagcgtgaggccctgatcacggcgctccgtcacactcggaatccggtgatactggtcgtcgacgcggaacggcttcgacggcatgggttggtccccaggaaagctggcaagaacgtctacgtggtggaaggaacggtgcctccggactgcatcactcgcgtgatccggaacccaaggaggtccgtcgagagtgaaaagcgctgaatggttcgaggccagcaccgaggaggagcgcgtagaaattcagcggaaggtagcccgtaaggtccgactggaaccgctcgacgacgtggacgccgtcgctggggtagacgtctcttaccgcggtgaagagtaccgggccgccgcggtggttctggaccccgaaacctacgaagtgctcgaccgtcgagtggtccacgggactacggacgtcccctacgagcccgggttcctggcgttccgtgagggtccaccggccctggaggctctcgagggactggacttcgacctgctgttcgtccacggccacggcgtagcccaccctaggcgggccggtctcgcttcccacctcggagtggccctagacgtcccgacgataggggtggcgcggcgtccgctcgtgggcaggtcgaaggaggaaccgagtaggataggcgataccacacccctcgtacatagaggtgaggtagtcggctacctcgtacgaaccgacgccgaagcccggcccgtagtggtgagcccgggccatcggtgtaacctcgaggacgccgtgagatggacgctgcgcctcgtccgagtgggaaagtggccagagccgctgcgtctggccgatctgctctcacgtagaggagcatcacgggtagagggtgaaagtcgtggcgctggtgtacgacgctgagttcgtgggctcggagcgagagttcgaggaggaacgcgagacgttcctcaagggtgtcaaggcctacgacggcgttctggccacccgttacttgatggagagatcttccagcgcgaagaacgacgaggagctgctcgagcttcaccagaatttcatcctcctcacgggatcgtacgcctgctcgatagacccgaccgaagataggtatcagaacgtcatagtccgtggcgttaacttcgatgaacgagttcaacgcctgtccacgggcggttcaccggcccgctacgcgatcgtgtacaggcgtggctggagggcgatcgccaaggctctagatatcgacgaggaggacgtcccggccatagaggtgcgtgccgtgaagcgtaacccgctccaaccggcgctgtaccggatcctggtgcgatacggacgcgtcgacctcatgcccgtaaccgtggacgaggtaccaccggagatggccggtgagttcgagcgactgatcgaacggtacgacgtcccgatcgacgagaaggaggagcgcatactcgagatcctcagggagaacccgtggactccccatgacgagatcgcgagacggctcgggctctcggtctcggaagtcgagggtgagaaggacccggagagcagcggtatctacagcctgtggtctcgggtcgtcgtgaacatcgagtacgacgagcgtacggccaagcggcacgtcaagcgccgggatcgactgctcgaggaactgtacgagcacctggaggagctttcggagcggtacttacgtcatccgttgactagacggtggatcgtcgagcataagcgcgacatcatgagaaggtatctcgagcagcggatcgtcgagtgtgcgctcaagctccaggaccgttacgggatccgcgaggacgtggcgctgtgtctcgccagggccttcgacgggtccatctcgatgatcgctaccactccgtaccggacgctcaaggacgtgtgtcccgacctgacgctcgaggaggccaagtccgtcaaccgcaccctggcgacgctgatcgacgagcacggtctcagccccgacgccgcggacgaactcatcgagcacttcgagtcgatcgccggtattctggccaccgacctggaggagatcgagcgaatgtacgaggagggcaggctctccgaggaggcttaccgggccgccgtcgagatacagttggcggagctcacgaagaaggagggcgtgggtaggaagaccgcggagcgtctcttacgcgccttcggaaaccccgagcgcgtcaagcagctggcccgcgagttcgagatcgagaagctggcctcggtggaaggggtcggcgagcgcgtcctacgcagtctcgtcccggggtacgcttcgttgatctcgatcaggggcatcgacagggagcgggcggagcgtctgctcaagaagtacggtgggtactccaaggtccgtgaggctggtgtcgaagagctgcgcgaggacggcctcaccgacgctcaaatccgggagctcaagggtctgaagaccctggagagcatagtaggggatctggagaaggccgacgagctgaagcggaagtacggatccgcgtccgcggttcgacgtctgcccgtagaggagctacgcgaactcgggttctccgacgatgagatcgccgagatcaaggggatacctaagaagctccgggaggccttcgaccttgagaccgccgcggaactctacgagcggtacggttcgctgaaagagatcggtcgccgactctcttacgacgatctactcgagctcggtgcgactccgaaggccgcggccgagatcaaggggccggagttcaagttcctcctgaacatcgaaggggtcggaccgaaactcgctgagcggatactcgaggccgtggattatgacctcgagcgactggcttccctgaatcccgaggaacttgcggagaaggtggaaggactgggcgaagagctcgcggagcgcgtcgtgtacgctgctagggagcgcgtagaaagtcgcaggaagtccggccgccaggagcggtcggaggaagaatggaaggagtggctcgagcgtaaggtcggcgaggggagggctcgccggttgattgagtatttcggctccgcgggtgaagtaggaaagctggtcgagaacgccgaggtgtcgaagctactggaggtcccgggtataggcgacgaggccgtcgctaggctcgtaccgggctacaagaccctacgagacgccggtctcacgccggccgaagcggagcgcgtgctgaaacggtacggctcggtctccaaagtgcaggaaggagccactccggacgagttacgcgagctcggcctcggcgacgccaagatcgcgaggatcctgggcctgcgcagcctggtgaacaagaggctggacgtggacaccgcgtacgagctcaagcgtagatacggttccgtctccgccgtccggaaggccccggtgaaagaactgcgcgagctcggcctctccgatcggaagatcgcacgtatcaagggcatcccggagacgatgcttcaggtccgagggatgagcgtggagaaagcggagcggctgctggagcgtttcgatacctggaccaaggtgaaggaagctcccgtctcggagctggtgagagtcccgggtgtcggattgagtttggtgaaggagatcaaggctcaggtggatccggcctggaaggcacttctggatgtcaaaggggtcagtccggagctggccgaccggctcgtcgaggagctcggcagcccgtatcgggtgctgacggccaagaaatccgacctgatgagagtcgagagagtcggaccgaagctcgccgagcgaatccgggccgcgggcaaacggtacgtggaggagcgtaggtcgaggagggagaggatcaggaggaagctccgagggtaacttcacgacccgcgcgctatctcctctacaacctccaggaacctctccgcttcctcgatgtcgttgtagaacgccaccgaggcccgaacacaaccgtcgagtcctagcctctcgaacaccaggctagcacagtgcctccccgttcgcacgcagatgttccgctcaccgagctttttacccacctccgcgtaatccacgccgtcgaccaggaacgggacgatggtcttcctctccgcctcgggtgctagaatctcgactccctccagctcctctaacccgttgaggatccgacgggtgaccttgcggatacgccgctccacgcggttcaacccgacttcctccaggatcttgacaccttccgccagccctatcacacccggaaggttcggtgttcctgattcgaaggagagcgggggttctctggggacgacctcgagatctcgggttacgtagtccgtcgaccctccaccgaggagccgtagctccagttcctccatcacgtcctcgcggacgtaaaggatcccggtaccgtgaggtcctaagaggcccttgtgaccgggcgccgctaggaagtgatacctcgaccaatcgtgatccatgtggcccaacgactgggccgcgtcgagcagcacgtacgcaccgacctcctcggcgagctctaagatctcgtccacgggctgcaatgaacccagggcgttgctctcgtgagttatggcgatcagacgtgtgttgtcgtcgaccacggactccaactcagccatgtcaacctcgccggtctcccggtcgaaccctaccacctcgacttcgaaccccaacacctcggagaacctcaaccacggtgccaggttcgagtggtgctcgagggccgtggtgacgacggcatcgcctttcttccagcggatcgaagccagcacgtagtggatcgaatgggtcgtgttcagcgtgaaggcgaggcactccggctcgactccgagaaacgaggcgacgatatccctagcacgctcgaactcctctgtggcacactcgcccggagggtgcgccccgcgacccacgttcacgccgaactcccgcaagaccctctccatagcgcttatgacgcgttcgtgcttcaacgacgtagcggcgttgtcgaggtacacccactcctccttgagtggaaacccgttcacgatctcatccaaacccaacgccttccctccggccgatctttgatcatggattcaaagtcgttgctccgccgggaacgttaacgctatcggacgtctttgacgcctaagcgggcgtgcagttcatcacccgcctttgagaaaacccctcaggaattcacgtatcctgcccgtgttagggacctcccaaacgtgccagccactttcgtaaggggtaacgagggagtaccggtcggcctccgggtcgagttctccaccctcccaggcgactaacacctgaccgccggccgccgcgacggcgctctcacgatcgtcgtagtagtcccgatggtcctccgaccgaagtacgagcaccgccgccttatggcgtcgttttaccctgtccaggagatatcctcgctccgacatgtggtccacgatatcgtctatgaactccggcggacatctcgtcacgagacgacccgtcttcgggcgcaggacatccacgcaggcgtccaggaacgacagcacgaactcgagatcgggcgtccgggagatgccgctgcgaagtccccacggaggatcggtcagcacctcgtcgacgggacgtctgaaatcttcgatgctgcactccagcgggaggacgtcacctaggaggacgtcccgattcgcggagacgttggcagacaaggccgcagagtgctccgggtcgggttccacggcgtacacggtgtaaggaccgagggccgccaccgtcagggcgaaggatccgcaacccgccccggcatcgaggacctctcctctccacggggcgcgaaggtcacggacgacttccatgatatacctggtgctagggattatcacacgcgaagggaacatagtgaggggatcttcgaggaaaggcaggagtaccgggaccgagcgctctgaccctcccattcgcggtcacccggcgtcgagagtggaaaatggacaaaatttaaagtacctggcagctgcgggcagcggtcgtacgaattaatgcttcgagaagcgttgggaagcccaacggctcggacggatgccttcggcccaggggggtcggttaaagatttgatagcgagtatatcatccggaacgaaagatgtcgctattttgcttctgttcctaggtcttacggcagttgccagcctcgcattcttgtaatctccgttctccgcaggtgattcccgagctcatgtcgttaagatctggttcgtgagcgagcttttcgagcgaggtcattggtcgtactggtgcccggtctggtattgcggcttcccgttcctgctgtactacccaccgctgttttacctggtaggaggtgccctgaacctcccgctaggagatcccgtacagacgctgcgtatcctggggctgacggcggtctacttgctcgtagtcgggatcttcttcgcgtgccgacaactcggcttcacgaccttcgaagcggcgttgagcaccctgctgttcctaacgtctccatccatactttgggagatcaaccgcggcggcatattcccgatgatgatgagcctcgggttcggactgctcgccctgggcctcttggagcgaacgctctcgcgagggttcacccccaagtccgcgctcggagtcatcgcgctgatcacgctctcgctcttcacccacccgatcggcggtatgacctgccaaggggccctgatcctgcgcgtgctcctagaggtagttcccgagggatcactccgtccgaaccagtggttccgagccctgaccgaccggcagaacctcccactactactccccgccgcacttccactcctcctcgcggcccctcagtacctcccgatgctcttgtaccggggatacatctccccgctggtcacgccggcccctcagacgccgttagattgcatagtcacactcctctcgtgtcccatgtggtcaccgttaccgtttttcatcctcctatccgtgttaggggcgtactatgcacttcgacgatcaggccccggtatccgtctgtacggggcgttgacgtgcctgatattctgcgcttcagtgttctcactactcgcgttctggtccatctacaaggtggctcccggcgggcagttgatcacccaccgattacccggagtgctcttcccgctgttcggcgctctgatcctcggatgcgtgatccgacaccgcccgaaggtgttcgcgaccctggcgatacctcaactcctactcttcgccgtgtacgtgtggagctacacgcaacccgtggacctggacagcgtgcgagagggtcacatcccgtctcccgtcgtccacttatggaaagcgatggacctgcttccccggtgcgtcggtgccggcctgacctcgcctcagagcctcctatggaccttggtcgccgccggcggtttcttcacgctggacacgaaacccacggaggacgcgaagtgcgcgttacactacctccgtcaccagggtgggccttacgaccgggttacgttcgacccgttcacgcacgtcccactgtaccgctgtgacagcgccttcgtacccatcgagtcgggccattattccctgctgggttggttcaaccagggcgatccggcgttctactcgctggcatggtacgtggagtggcaacattcgtgggtcttctacccgaacgcggttctgacggtatttcacctggcgaacgtacgatacgtgatatccggatcacctaagtggaccgcctcgctcgagcgtctccccgagttccaccggctgacggacttcgggaggtataccgtattctcgacatcggtgagcccgggtcccgccgagctggtaccgcgcccgattctggtgatcgacgacatcctcaggcgaccgaacccgtactacaccatggttctcaacataataccggatggaggcacacggaggatcttcgtcgagggttcacccgaggacgtggcgcgcttccgtcagatcatcgtgcgaacggatcgaccggacaccctcgacgaggtgctacggaagatgaagtcgggacgcgtgttggtgatcgtgcccgcgaacgattacgcgacggccagatacctggccgagcggttcggacttcacgtcaggcccgtgatcgtgtgcccgtgggaaccgctcccgtcaatgaaggtctgcaacaggctgatcgacgcgtaccgattcgtcggaatcacggtgcccggagccaccccggaagagagaacctggttcctgttcaacggacgcccttgggtggatgtgaagctcggaaaggtcgaagtccgggtgtgcggagtggacttcgttgacctggccgggacgttacaccaaacgctgtactacggggccggggcgtaccccttacccccgaagtgggagcgcgcgctcctcaacgaggtcctaaggggcttcgactccggtaagccgcgacccgtgaagttcaaggcggtcgaaccggacgacgtgcgcgtgcgtgggaaaggatacatactcgtgaagataggataccacccggcttggcacgcgaacgccccgacgtaccggggatcgggaggactgatcatcgttcgatcgacaggtgttacacggctccggttcgggttcacgtggtgggagaggatgctgtggtggggagcgttcgcgatcggcctgatggggtccacatggctgtaccttagaggtagggacgagggtcggtgatctcaccctcgatagcgctggcggcggccgtcgccggactggctagatacacttccgactcgcggtgtcccatcctacccggaaagttcctgttggacgtcgctacgcatcgctcgccttccgctagcactcccatatggccacccaggcacggaccgcagttcggcgggcagatcagtgcccccgcctcgtggagtacttcgagcacgccgtccttgagcgtccggtggtaaacttccctcgacgccgggatgacgatcagccggacgtcgtcgtggacctcctcgccttcaagtacctccgccgcaaccttcaggtcctcgtaccgaccgttggtacaggaaccgatgaagacttggtcgatcgcgataccttcgacctcccccacgggcaccacgttgtccggagagaacggcttcgcgacctgcggctcgaggtcgctcacgtccaaggtcagctcggcctcgtaccgggcgtccgggtccggctcaaccgggcgcccttccgtacccgcacgcttcttgacgtactcgagcgtcttctcgtcgggtggaaccattcccgtcttcgctcccatctcgatcgccatgttgcacaggcacatacggtccgatacggacatctctcggacgacctcgccgtggtactcgatcgccatgtacgtcgcaccgtcggcaccgatttctcccgtcaccttgagcacgacatccttcgcgtacacaccttccggaagctctcccgtgatctctacgcggtaagtttccgggacgcggaaccacagcttaccggtcgcaaagaccgccgccatgtcggtggaaccgatcccggtggcgaaggctccgagcgctccgtgggtgcaggtgtgagagtcggcccccacgatcacgtccccgggacgcacgtgacccttctcggggaggacctggtgacagacaccctcccgaacgtcgtagaagtgctcgataccctgttcttcgacgaactcccgcattattttgtggttctccgcggcttccacggagtccgcgggcacctgatggtcgaacagcacgacgatcttggacgggtcccacacgcgctcgactcccatctcctcgagccgctgaaccgtgatcgggcccgtgatatcgtggaccatcgccacgtcgatgttggcgacgacgatatcccccgcctcagcgtcttctccggacgctcgagacagtatcttctcggccatcgtcttccccacggtgctcgacccccggccgcccccgagcggcggttgaaaaaggatcggggacccgagccccgtatatcaggtggaagtgccaaggtctagaggggcgatcctgacctcggacatcgaccggttggtagaaaagctggctgaagaggtcggaaagcgcgaggaggaggtgcgccgggagatcaacagactccggaaacgatggggagtgtcggagctcggcgcgcttctcgccctcgccgaccggatgggtgtgaagctgatgcgaacgggagaggaaaaaccggggagagtgacgctggatgaagccatctcccggggactgcagtccttcgacacggagttcatcgtcgtacgcgtgtcggaccccgcgaagaccaggtcgggcggtaaaatggtgaccttggtggtgggggacgagacgcggtccgccgcgttggtagcgttcgacgaggccgtcgagacactcgaggaactcgaggagggtgatgtggtacgggctaggaacttgactgtgagttcgttccgtaacagtccacagctggtggtcactcgagagaccgagcttgaagtcgtaggctccgaggaggatccgaaccggatcatcgagcggaacatctccgaggtgaaacacggagagtacgtgcgcgtgcgaggtgtcgtggcgagcgagcccgtcgatacgggagaacgcgtatacttctggctctccgacgagacaggctcgacgcgtgttaacctgtggggtgaggaggccgagcgtgcgctggacctcgactacggcgacggtgtgatcgtggaagggtgggtctctacccgcggtgatcacccgacgatcaacatactcagaacccaaggtcgtgtggagcccgctgaggtttccatcaaaccagctatccggaagcgtgtcgaggagctcggtaagggggatgtggcggaggtatcaggcgttatcgtcgccgtatacgcacgtcgtcggtactacgaggcgtgccccacctgcggtcgggccatgaggaagggagagtgtcccgagcacggggccgtggaacccgaacggagacccgtgctgaacgtggtcgtagacgacggtaccgggacggtaaggacggtgttcttcggggaacacgcggtcgagttcgcgggatacgagaccacgagggaatacctggaagccgacgaatccgacatcgaaaagagacttttaggtgaaagtgtttccgtagtgctcagagttcggggagaaggggtcgtagaggactacgatgccgtcgcactgcgggctaggatactcaacgaggaggacttcaaacgcgaaatcccgatcttggtccgggagctgaagggggaggagagtgaaggagaggaagctgagtgatctggacctactgcccgatgaaaccgtcaaaaagctggaagagaaggggatcgtgacggtcgaggacttcatttacgccgatccgaagtacctgtcggaggtgacggggatgtctgagcgggatgtggaggacatccaggaggagttgaggaatatcgacgtggaattcgagacgctggagaagctggaacggaaacgcaggcgcataaccacgggctccagcgcgctcgacgagatcttaggaggaggcgtcccgtgcggggagttgacagagttcgcgggccccttcggctcgggtaagtcccagatcgtgttccagctgtgcgtgaacgtacaactaccggaagaggagggcgggctggagtccaaggcgatcttcatcgatacggagggaaccgtatcacccggtcgtatcaaggggatggcggaagccttagggctggatcccggagaggccctgcgcaacgtcttcgtgacgcaggtgagatccgtggaagagcagatgcgagccgcggaggaggcgcacaaactgtgcgagcgcgaggatatcggactcgtcgtcatagattccctcacggcgcacttccgcgcggagtactcgaagctgggggacgtcagcgagcgtcaggccagactgatgaagcacgtggatcaactcaggaaccttgccatggaccacgacgtggccgtggtcttcaccaaccaagtgcacgtcgatatcgaggccgccacgaagggcaagggcagacgttacgagcccgtcggaggaacgatcgtagcccaccaggccacgcataggatcatgctcaggagagccaaaggtgaggtccgaatcgcacggatcatcgactcaccgtaccttccacagcgtgaggcagcgttcaggatcacggaagaaggcattcgggacgtggaattccctgagcgatgaggacaggcccaatagccgaaacccgatgacgagctcccggtcccatccgagccctcgcgggtgaaacgcttatggagttcgatgtggtggtggtcggtgcgggtccggcgggttcggtggcggcgtgggccgcggcggaggccggttgtgatgtcctgatactcgagcgtaaggccgagatcggcgtccccaaacagtgcgccgaaggcatcagcgcacgagctctcgaggaggtcggaatcagacctgacgacggttggatagccgcggaaatagagcgtggtatcctctcgctaccgagtggttccaagttcgaggttgaggtcgaagggtacgtgttggagcgtcgtgtgtttgataagtggttggttgttcgggcggtggaggctggtgcggaggtcgagttgttggcgcatgctcgacgggcgttgttagatgagggtcgggtggtcggggtcgagtacgagggcgaggatggagtgcacgaggtccgagcccgcatcgtcatcgccgcagacggaatcgaatcacgcataggaagaaccgccggactggttcctcaactcgagcctgatcatatatgcacctgcgcacagtacgaggtcgtcggcgaccggtacgatccgaaggcgttcatgatccacttcgatcccgagcggatacccggcgggtacgcatgggtcttcccgaaaggggagaaccgggcgaacgtaggggtgggaatccgagggtccgaatccagtccaggtctggccttaaaaacgctcgacgagctcgtcgagggtcccttatccgagctcgtagcggggacgccagtggaggtgaacgtgggtggtgtgccggtgtgcgggcccgtcgagcggacgtacggtgacgggatcctcctcgtgggtgatgcggcccgccaggtcaacccgttaaccggtggcgggttgaacaccgcgcttatctgcggtcggatcgcgggcgaggtggcggtcgaggcgatcgaagaggacgacacgtccgcctccttcctgaaacggtaccaagaccggtgggaagaagaattcagggacacgttcgaatgtgcgcgtgaggtggcggaaatgctcccagagcttgacttgaaggaagtcgtcgagttcctatcgtcggtggaaaacttggaggaaatgctgaggacatctggtatcttggaggacgtgtggtggggttagagttctccgcgctgctcggccatgaactcccgatgcttctccgtccagcgaaccttcttcggatcccttccgagcttcagcatgttacgctcgcacttgctggagcagaaccataggatcgtgccatcgttcttgacgaacatttttcctgtccctggctcaatgatccgaccgcagaagtcacagcgccgaacatcgggcattctgagccccccttactcgatcggtcgcgcctccctctcggtttccctcagcagtaggatgtctccttctcgaacgggccctttgacgtttctagtgatgatcctacccttgtccggtccctccaggatcctgaccttcacctgtgtcacctcaccggccattccggtgcgccctaagatctccacgacttccgcgggtgttgcgtcctctgtcgggtcgtagtcgcactctaccatcttttccaccccctaggcgaggccttccctgagccccgttatgaagtttcgtcgggggttcggacgcggtacaagacttaaagtgaagggcgggttcggcgcgctgggggtggccgcttgcccgagttcaaggtagtagtggcggatccggagaaggctcgctcctaccaggtggaggtgaaaggtgaggatgccgagaagctgatcgggaagaggatcggtgacgtgatcgacggcgaaatcgtcggtctaccggggtacaagctcaagatcacgggcggaacggacaaggacgggttcccgatgcgacctgacatccacggaccggtacgcgttcgcctactcctcagcggtccgccgggtttccgccccgagcgtaaaggtgagcggaggcgtaagacggttcgcggtaacacgatcagcgaggatatcgttcaagtgaacaccgtcatcgtcgagtacggcgacaagcccgtggaggagttactcggcgagggcggcgaggagtaaccgcgggtgggtaccgtgcccgtcgacttacgacgagtggacgacgagcggttccaacaggccgaaatgaacatcggaatggtggggcacgtagaccacggtaagaccacgctgacgaaggccctctccggcgtgtggacggacacgcacagcgaggagaccagacgcggcatctccatccgactgggttacgcggacaccgtcctcacgcgatgtcccgagtgcgacacctattcggtggaggagaagtgtccggagtgcggagccgaaaccgagtggctccggcgggtctccttcgtcgactccccgggccacgagacgttgatggcgacgatgctctccggtgccgcgatcatggacgcagccatcctggtgatcgccgcgaacgagccctgcccgcagcctcagacccgagagcacctgatggcactggaaatcatcggaaccgaagacgtgatcgtcgttcagaacaagatcgacttagtcaccccggaggaagccagggagcattacgagcagatcgtacagttcctggaggaggagacgcacctcgaccccgataagacccccataatccccgtctccgcccagcataaggcgaacttagacgtcttagtcgaggccatgtacgagcacttcgagccccccgagtacgatctggacgcaccgttccgcatgtacatcgcccgatcgttcgacgtcaacaagcccggtaccagaccgagcgacctcaagggcggcgtgataggaggagccatcgtccagggagaggtcgagatcggtgacgaaatcgagatacggccgggaatccgggtggagcgatacggtcgtaccgagtgggaaccggtgtacacggaggtggtgagcctccacgcgaacgtgacgccggtggagcgtgcgagacccggcggtctggtcggtataggcacgaagctagaccccaccatgaccaaagcggaccggttgtcgggccaagtggccggagaacccgacacattgccgcccgtccgtcacgagctgctgttggaggtggaactgctcgagcgggtggtaggaaccgaagaggagcgtaaggtggaacccatccggacgaacgaggtactgatgctcaccgtgggtacggcgactacagtgggcgtggtgaccagtgcacgggacgacgagattgagatcaagctgaaacaaccggtgtgcgccgaagaaggcgacagggtcgcgataagccgtaggatccagcggtggcgtctgataggccacggtgtcatcaaagggtgaaggggcgtgaccatcagagtcgtgttggacgctaacttcctcatgataccgcatcaggaaggggtggacgtgttctccgaactcgaccgcctcttgggctcctaccgacccatcgttccccgtcaggtcctcgaggaactggagcgcgtgaagcgtgcggctaccggtcgggacaagatcgcggcgcgagtagccctatccctcgtagacgctaaagggatcgaggtagtggacgttaaagggagggacggagacgaggcaatcttgaacctcgcccgacggtgggatcgagtgtacgtgggcacccgagacaaggagctcaaaaagcgcctgtggaaactcggtgttccggtgataacgttgcgtcagcgcacacacctggtgatcgagcggggttaacaccttggaagtaccaccttctcccgtcctgagcgatgccttagggaagcgctacgtactccggggaatccgtcacatcgtgggcccggtgccgatctgcggacgggcggtgactgtgctcgtggaagggacggactgggggaccgtggtggaagccatcgacgaggccgaggaaggtgacgtgctcgtgatccaagccagagacagggcgcgggcgtactggggaggtctctcctctctatcggccaagcggaagggattggccggaactgtcgtggacggattagttagggacgtagatgacgtacgcgagatcggctacaccgttttcgcccgcggcgttacccctagagcgggaacccaccgtcgatccggaaagattaacgtcgacctgtacgtctcgggcgtgctcgtgcgtcccggtgacattatagtgggggacgagagcggcgtcgtggtcgttcccgaggaggagtgggaagacgcgctcaagcgagcccgtgagatactcgaattggaagatgacatcaggaccgacatcgcggccaaccgtgcatggtgggagatcgtgccggataagttggggggatggtgaagagatgatgaacctctggaaagacctggaaccgggcccgaatccacccgacgtagtgtacgcggtgatagaaatcccacgtggctcgaggaacaagtacgagtacgacgaagagcgtgggttcttcaagctggaccgagtactctactcgccgttccactatccactggactacgggtttatcccccgaacgctgtacgacgacggtgaccccctcgacatcctggtgatcatgcaggaccccacgttccccggctgcgtgatcgaggcacgaccgatcggtctgatgaagatgttggacgacagcgaccaggacgacaaggttctggcggtgcccactgaggacccccggttcaaggacgttaaggacctggatgacgttcccaagcacctgctcgacgagatcgcccacatgttctccgagtacaagcgactggaaggcaaggagaccgaagtcctagggtgggaaggtgcggacgccgctaaggaagccatagttcacgcgatagagctgtacgaggaggagcacgggtgaatcccgttgtacgagctcgtggaactcgaaaccacggttagaattccccccacccaatttacctccgacgtcgaggatgccgtgctcaaagccttagagaacgacgtcgaggggaagctcttccgggaagatgacaccggcgagcccatcggattcgtggtcttcgtggacgaaatcctcgacgtggagaatgagggtattttccccggcgatggcgcctcctaccaccgcgtaaggttcagggccttggtcttccgcccggtggagcgcgaggtggtagtgggcgaagtaactagggtgaaggagtacggagccttcgtgcgtctgggaccgctagacggtctcctgcacgtctcccagatcctcgatgagtacatgtactacgacggggcccgagaggcgctagtcggtgaggagaccggtcgggagctcaaacggggtgatgtgatcaaagtgatgattatcggtgtgagcctcaacgaggaacggcccagagactcgaagatcgccttgaccgtgaagagacccggtctagggaagccggagtggtgggaatgacctcgccctgagcggggttcaggacggtcccttccgactccattcaggacacatctttcgtcgccaacgttgaagaggccggaatcctctaacatccgagagtacccgggggagtcaaggctcaggggaatcctgcggattccatcacccccaacgcatcagcaccgaaaagaactcgtacacatgctacatgcctcctctcgcctgaagggcggggtcctccagggggtcgtgaaagccgttgtccaagttgaaagcgtgcgtcaggtgcgggtacctggtggaagaggataccgagatctgtcccgcctgtcacggggacgagttcacggagaactggcgcggtatcgcagtgatcctcgacactgagtcccagaccgcggacaggttgaacgcgaagatcccaggtaaatacgccctgagagttgaggagtgacggtcgtgctgaggctacctagggagctgcgccccgagctacgtcgaccctggggcacgctatacccacgaccgtccattaagacctaccgacgtctccatgaggagtcagaagtgctgattacagtcggcgacatgaccacccgaagcttcctccggtgcagtatccggccggacgtcgccgtcgtagaccggaagatgctcagaactgtccccgtggatccagggaacaagttcccggtaaccctcgacgtgaacaacccaccgggtactatcacccgggaggcttgggatactgtacggcggggtatcgactacgcactcgatggcgacgcgaccctcatcgacgttaccggagaggaagacctactagccattcccgctatcctgatcgctcccgaaaactcgatagtctgctacgggttgccgggcgagggaatggtggcggcgcgggtaacccaacacctcaaggattctgtcctccgactgctaacgaggtttcgggggtacgacgaatggaagtcgagatcttggatcagcgggataaccccttgctgtaccgcaaagaggtgaagttcgtcgtacgccacgaagacagtggtacgccccagaagtcggaggtccttcggaagctcgcggcgattctcgacgttgacaaggaggtagtcctgatcgaccgtatggagtcggagttcggaaagcgtgagaccaaagggtacgcgaagatctacaagagcatggagcatctggaggacatcgagcccgagcacatggtcgagcgacacaagaaggtgcttgaagagctggagtccgaatccgaggagtccgaagagtccgagtcggaggagtcggaagaagaggagtaaccgggggtaaaacgggatgggtgtgcccaggagggctaagctgtacgaggttaaggacggtaaggtggagcgcaaaaacccgttctgcccaagatgcgggcccggcgtattcatggcggaccacgggaaccggtatgcgtgcggtaggtgtggatacaccgagttcaaggaccagccggagcccaagaaaaagaagtaacattcgcgagcgaagtgaggtatcttgcactcgcgagttcccgaccgactgcgcgacgtagtggaagccggtgacgtcatcgccctcggcgccgagtcgctcctggttcgacacgactggctcgggctcctcgccgtctacaagatccgtcttcccaaaccctaccgtcacccgtccttggacgagcgcctccgtcgcctcaggactcgacgagaagcccgagcactgatcagattacccgagatgggtgtgccgactcctaccctgtacgaggtcgacttggatcttagcctgctgatcaccgagtacattcccgggagaaccctcaagcaggccaccgagagttccttcgatccggaccattaccggaagttgggtaagctcgtcgggcggatgcacgagcacggattcgtccactacgatttgaccacatcgaacatcctcgtgtccggtgacgacctctacatcatcgacttgggactgagcgaggactccgacgaccccgaagaccacgccgtcgacctgcgcgtgttcgaacggtgtctcgagagctcccaccccgaggttaaggaggaggcgtggagagccttcctacgaggctacagggaagagagggaagaagccaccgacacggtgctccgggccttggaggacctcaagtccagggtccggtacatctaaaccttcgccaccacaaggccccttttgacctcgatctccccacgttcttcgagctttttgagggcaacgtacgtaacgtcgtacgggacgccgaactgtgcgaacaagaactcgtagacctcatcctctggtactctgccccgattctgcaaccacaccagcaaggcaccgagtacctcggacaggcgctcgggcacgtgcattagctcaccatcttccgtcatctccacctcgtcgctcattagcgccgagtatagggcttcggaaagtccctcaccggagtaccctgcccatcggagtctcatcacgaggtcccgccagtcgagactcacctcacgcttgacgacttgcaccacgtcacccggagtcaccgggcggtctcccaccaggaggtcctccagtggctcggtgtccggccactccggaatccttccgagcttcgcctcgagaaacacctcggtcgccgagccgtagtccagcctgaatgggtcctcaatgacctccaggggcagcgtctcccactcggtcacggctaacccgagaccgtagtgctcacagaacgccgatacggataccacttcttccctcggttcgcggggaaagaccaccagagcccctaaacccaatgcctccgcgtcacgtgcgatctcggccagtccctcttcccactcccccaaggccgatatcgaagctagatcgctgagacctccgacgcataccagcgcgaagcagaaatcgtccgaacggactacgaagtccagctggtagtcgctgtctacctcctccacgacgcagcccagctcctccagtacgaacctacagtcccggcggaacagggacaagttaagatccgtcatcgcgcctttccccgcaggcggggtgccgtaatgtcgacgatgatctgtgtgggtatagagtctacggccgagaaactcggcgtgggtgtcgtgacggacgacggggagatactggtcaacgtgaaggctcagtacatcccccctccgggctcggggatactacccagagaggcggctgaacatcactccagagaactgccggagctcctcgaacgcgcgttgaagaacgcgggagtggagcccgaagacatcgacttagtggcttactcgcaagggcctggactgggaccctgcctacgtgtcggcgccaccgcggcccgaaccctggcactgacgctcgaggtccccctggcaccggtcaaccactgcgtggcccacgtggagatagggaagttagcggcacgccaggacgggttcgatttcgacgagccggtaacactctacgtgtccggagggaacacccaggtgctggccctcaaagccggacgataccgggtgttcggggaaaccctggatctccccgtgggtaacatgctggacactttcgcccgtaaggtcggactcccacatcccggtgggcccgagatagaacgcctcgccgaggaaggtgagcccgtggaactcccttacactgtacgtggcaccgacgtgtcgttctcaggccttctgacggcggcactgcggagatacgagcagggagacaggctcgaggacgtgtgtgcaggacttcaggagacagccttcgcaatgctggtggagataacggagcgtgccgcggcccagctgggccgggatgagatcctgctcacgggaggggtggccgcgaaccgtcgtctctccgagatgatgcacgaaatggcggaggaccgcggtgcggaggcgtacacggtgcccccggaactggccggagacaacggggccatgatcgcttggacggggatcctcgtccacgaacacggcctctcgataccgcccgatgagatcccggagaaggctatcgtcaagcaacgataccgtgtagacgaggcgcccgtcccgtgggccgctcgtccttccagatcggccgattctcaaggatagagtaggcagctcgtcgagcccacgctatgggggttggaactggcccgtagacgacggtgggttaccatcttcaggatacccacggaaatccgggctcacgagctcagagttatgggcccgtaattaacggctgggacagcacggtcgagccggctgaagtactctggcctgagctcgcagaatgtcgacgctcttaccaggagactcgtacgcgcctacctgaaacggaccggaggagggtttcgtcatcgagcaaggtgtgacccgtgccgaccccgccctgtatgcgttcgtctcttccaggaccgtcggaagtacgagtactggccggtaaaggtgggtaaaggcggtgagatacaaaccgctccggttcgagctcgagtgcgtcgagcccggcgccctgcctaggttcaaagggttcgccgtccgcgggatgcttctacggcggctcaaggaaagattcccagggttcgtcaggaggttcctatacggtaaccacccgatcccggccgtgacccaggtcccaccgctcaccgacgagaggatggtcgatgtgggagacatcgtgagcttccgtctgaacctcttcggagacgctgtcgacagggactatgagatcatcctcgcactggtggacggtgagttgcgtctaggatcggccaggttcgtgctgcgacgcgtcgaacacgccgagacaggggagcccgtgtgggatgaatccgcgtaccgatgcgtgaaaccggagaagcttgacgctcgcgagccggtggggaggtacctggtggtcaccttcacgacacctacttacatcgtccacgacgggaaacctagggtccccaagtttcacatgatagtccggaacgcggccaggaagttcaccatgctacaccgaaggttcggtctcgaggggttgacccgacgccaggccagaaacatcatcgagtgggccgagcgggccgaaacaatccgaatggattacaggttcgagaccctcgagcgcaggtcggcccgactggggaggcacgtgttccgcacgatcgtgggaaccttcgtatacgagctccctcccgagcccccagaccgcgtcggtgaggtgctggccttcgccgaggtctacggagtggggaagttcaacacggcgggactcggacgcttcgtcctcggagaggccggatgaactaaaaccggaccaccgagaccgaccgggaagggggcagcttgagtggagctgaagttctcggctgaagtcgagctcactctctcgcgtgaagtcgaccccgccgagatcgagcctacggttgaggagttcgtcaaagaggctaacgaggatctcctccagcgaggtgtccccacggggaaggagggggccaagatcgagagttatcgggtactcgaggacaccatcgagatggagattaccggaacgaggtacctgcgtccccacgaggccgctatgagggtccgtaagcggctcgccgaacgtctcgggaggaagcaccgggtcggcgtccgcgacctgaagatcccgcggtacgaggttgtgctccggttcgaccgtgaggtcacgcgtgacgacgtcgggtacgtacccgtagccgacgacgtggtggtggaggacgggaccgtacggctgacgttccaagacgtcgacgaggagatgctccgccggcacgtcatcgatcgggtgatacggctcgtagcttgggccgtcgaggagaggtcggagctagtggagcgcgtcaccaaggtcgaacccggtaccgtggtggacgagagcggtccgcgagagatccggttcgatggggacgtcaccgaagaggcgcgtcgacggggttgggtgaaggagttccccggccgcggacagtggatttacacccctccgatggccgccctgttcgaagtcctccgtgacttccttctggagcgtgtgacgcgtaagttgggcttcgagcccgccctgttcccgaagctaattccgttggagactatgttccggatgcgttacctccacggtctacccgacggtatgtactacgtgtgtcccccgaagcgcgacccggagctgttcgatgatttcaagcgagagctctacgtgtggggagaactcaacgagaggaccctcggatcgttgaaggagaagctccgcgatcccgggtacgttctggcaccggcccagtgtgagccgttctacgagctgctgcgggacgaggtggtggaccccgagcgactcccgatcaagctctacgactgcagtggctggacgtaccggtgggagggtggtgccgcgaagggtctggaacgcgtgaacgagttccagcggatcgagcacgtgtggatcgccgagccggaggaggcggagaggatccgagaggagttactggaagctaccaagcgggtcgcggaagagctggagctcgagtggaaggtagtcgtatcggacgatcccttctacctagagggtcggctgctggaggatcgggacatcgagctcccggacgtaccgtcgtacgagttcgaagtctacttaccgttcaagggagaacggtcgtcggaagaagcctggatctcggtgggctcgttcaacgtgcacggcgaacacttcgtcgatggcttcaacgtgaaggagaagtcgggaaggaccctgttcacgggctgtgcgggtctgggtgtcacccgatgggtggttgggttactggctcaacacgggttcgaacccgaggagtggccggagcctatcctcgagagaatcgacgagaagttcggtgggctacccgaggtaccgaagacgctaacctggccggagtagtccgatcccgatccttttttcaacggcgccttccggcgggccggggggcttgcgagcttggtcagggacaagtggaaggataaggtatggtacacgatcctcgcgccggatatgttcgacaatgtggaagtgggcgagacgcccgccgacgacccggagaaggtgataggccgggtgctcgagaccacattaggtgacgtactggacgacatcaccaagcaccacatcaaggtgttcttccgcatctacgacgtcgaggggacgacagcgtactccaagttcgaaggacaccgactgatgcgcgactacgtccgcagcctggtgaggcgtggaacgagcaggatcgacggtgtcatcgacgtcgtcaccaaggacggatacaaggtacgcgtcgcgggtctggcgttcacgacgcgacgggccaagacatcccagcagcgggccatcaggaaggagatgttcaaggtgatcgaagagaacgcgaaggagtgcgacttcgacgagttcatccgcaggtgcctgtcgatcagcgaagaggagagcatcccggagcagatcaaggaggcgggtcgtaagatctacccgatccggcaagccgagatcaggaagacggaggtcctagaggagccgaacggcctaccgccatacgaagcggtgggggaccgggccaccccggagctggccagctactgagcctccctccgcaacggtcttcgggcgcgtgcgacggatgttcctagtgaaaacgcaacgaaacctggaggatgtagcggcagcgatgatcgaggaggaaaccggggccgaggccaagccacggcccttcggttacctcggtctagtgatcgttacgggacatgttaccaaggatgaactcgagaagatcccggaggtagagcgggccataccggtggaagccgagtgccgcgcggatccgaaggagatcgccgaaaccgcggccgaactggcggagaccaaaatttcggaggacgagaccttcgcggttaggacgatccgaaggggcgaacacgatttcaccagcgtcgacgtgaacgttgaggccggcgacgccgtccggaaggccaccggtgcctccgtggacctcgacgatcccgacaagatagtgtgggtcgagatactcagagaccgggcgtacctagcggtcttacccggcgaggaggagtggaagaagctacctccaggaaaacccgaagccgatccactgctcgccaaactcgagttagcacagataccgtatctcggggatccacgggccgcctactccatgggtgaaaggatcgggcgggcggttcaggggttcgaattgaagtcgtacatcgtcaccccttacgaaccggtgaacgccgtggaattgctgcacttcttacggggtctacgagatggcgtgaagtccaggatggacgtacaacgcgagtcgtacgggcgggagttccggcggacggagctgctactctacgacctctaccagctgatacggctgaagcgggacgccctgatcatagggacggatccgaagggcgatccgtacacggagatccggaagacactgggcgaagcactccgggaggcggacgaggtggtcgtgctggcgggatcgcgggtgggattacctaggggagtgctgagagcgtgtgacttcgtcgtagacctgtgtccgggagtgacgttcgcgacggaacacgtcgtaccctccgtcgtgacggcgctggtggactcgtacctggaggccgaagggagcgaagatcgagaaggacgttgaacgcacatctctgaacgataccgagttcgataataagcgatcatacagaatgcgcacagtaggtaggattcgatctgaagacaccaacttatcgttggatacgtggaaccgtaacgtcttaacctcaaggtcgtctcctactcatcgcacccacggggaaacgtccgacggcgtattcgggacagccgctcgaacatcgatccgcttctccttcggacccccgtcactcgccaggagcccagttcgatacgatagccctcctttcaacggtgagcctccgacggaccgagaaaccgcgggggttcagcgtgccgtgtacccgctgtgacgcgcgtgaaccgtacaggcggttcaccgggggcgttgccgttggaggttgtaggtgtggtgcacttaccgccgctgccagggtctccgcgggccaagtctatcgaggaggtagttgagcgagcccgccgggatgcagcgcggctcgaagacggtggtgtcgacgcagttctagttgagaacttcggggacaccccttactaccccgatgacgtgcccaagatcaccgtggcctgcatgaccagggcggtggctgaagtcgtcgataccgtgagcgtccccgtcggcgtgaacgtgctacgcaatgacggtgtagcggccgtcgacgtgtgcgctgcgaccggcgcctcctttatccgcgttaatgcgtacgtggaggccgtcgctacagatcagggcgtcctccagcccgttgcgcacatggtctggcgcgagatcgaccgcctaggagtggacgtcgaggtatacgctgatatcagagtgaagcacggacgacctctggacgacagacccgtcgaagaggtcgcacgggacgctgtggagcgaggactagccgacgctgtgatcgtcacgggctccgccaccgggtcccctccgcggcctgaagaggtgcgcaaggttgccagggtcgtcgatcgagttctggtgggtagtggcgtgactccggaaaacgctcacgttttcctccgagccggggcggcgggtttcatagtggggacatacttcaagaagaacgggatcaccgagaacccggtggacgtggaccgcgtacgtgagctggtgcggttcatccgacgctcaggggtagaacgctggccttgatacagaagaggctgaaccgtagggagctcgaatgggtgaggaagagagtggcgcgagaggcggccagactcctctacgagggtgccgtcgacgagtatatcgacgcgaagagactggccgccaggcgcctaggtgtcgatgtgatgccgtccaaccgtgaggtcgcaatcgaactcgaccgcatcggggacgagctagaaggcgaagagaagctgcaccggttgaagaggctaagggaggaggcgctcaaagtgatggaggccatcgaggacctggagccgcggctgatcggaagcgtgtggcgcgggaacatcaaacgggaaagtgacatcgatatcgcggttctggggacgacggaccccgaggaagtcatcgagcgcttgaaggaggccgggatcgaggtattggacgtggaggaagtggtgatcacggagcgcggtgggaaacccctggacattccggaacactacgtcaacatcaaagttaggacaccgggcggcgagaaggccgagatcggcgtcaccgtcagcagtccggagctggaacgtaaggggcgtgtagacctcgggaggtgcgatttcttcggagacaaaatcacgggattgagcgtagaagaactacggaaactgcttcgagaggacccttaccggaagttcataccccggggctgataccgaacgagatctacttccactccgatcgtgtccagtaccttctgaacgacgtaatctaccaggtcttcgatagtcgtcggaccgtggtaaaaagccggacatgccggcagtatcacggcaccctcctccctcaacttcaacgcggcctgtaaggcggacctgggccacggtgtttcccggactacgaacaccaacggacgaccttccttcagagcgactaccgcggcgcgcttgatcagatctccggctactccgacggccacactcgaaagggtgtgcaacgtgcatgggcacacgatgtacgcgtcgatccgatacgtgccgctagccggcggtgctgtgaggtccttagggtcgtacctccgcacgttctcggggaggtcaaccccctcctgctccatgacgtattccgcggatctagtgactgaaatctctacgtccaccccctcttcatgcagcacttcgatgagccttctggcataaatctgcccactggctcccgtaacccctatgaagactcgcaaacccctacccccgagaaccgagatgacgagtgatgggcggaccgagtacacgacgcgatgacgaatcctttaagtgccgatcaacccatgcgttgccttgtacctggcgtacactgcggcgaagttaaacgccgcgtggatcgagatcgccgtcgagtaccctacggcgaacccgagccatcgtcgcctcaatgacccgtacaacagtccgaaggaagacgtcgcgatcacgtgaatgggtagtgacgtaaacgttcggacgaaccccacgattatcgggcctagaagcccgaatttcaaccctaccagcgcgtagaacacgttctccatggatccgaaccctaaggcggtagtagccgcgaccgtaacggttcccaccgggcgcctaccacactctcgtacgaccttcgcggccgtccctacggtcggtccgattacgggaaacctcgatgccaatcggagagcgccggccaacacccgcggaactacgaggaacccgagtcctttggatagttcttcaactatcggggctacgaccacggccgctataaccagccgataagggccgcttaggcccgacgtcaggactgtttctaccaggaacgctatcaccacggagatcggggcgtagaggagccctaacaggaccccggtcaccgcgattaccggagtcaggatcaagcgtctatcccccggtgatgaggagagggcctggacgccgactgagggatgacgacaacggccgtcgccgaccgtttctctcttaagtcttcgtaggccgacccttccgggggataccccgcgtgttcgtggcgaagtacctgggttcggcccgttactcggagctcgacgaagaactgaaggacttcgcacggttaaaggcacacttggccggtgtggacttgaacagggaccctgaactgatgatattcaacgtggagggcacgagcagttactacatagtgtttctcgaggaggtagaatccgaagaggacgtcgaacgcctgttaagggaggatatgggggcggagctatcacgggattcgaaggcgtcggtgaggagagtgctgaaccgctgaaggcccaatgggtcgccctgaacgaggtagtgagcgagcttcgagcacggggagaagaggtgccgggagaagtcctcgagaacttgcggacggcgcgagtaatcctccatcattacgagttcgaccctcacacatccgccaggactctggggaaggcccacaagtacctggatagggctcagcgggcgctcgccaggatctgtgagtcccatccggatctactggataagttggtggagtggccgaagcgcgtgaaggagctggccgcgaggttccgggaggacaccgcccgctctaagttcgagccgatgcccaatcgaccggttcccagggccggtgacgggttcgcccgtgtgaggctcccggaacctatcgaagtcgagaggcttcaggacgtgtgtgagttcgcgggagtgatagtcgagatgaaggaggtagacgtagtggaggtattcggggacagggaccgcgtcgggacggcgctcaaggaactcagagagctgccggaatcttggaagaagatgctcgagaaacgcaagagcaatgaataagtaaagatcgacggacggtcccgctgatcgcacgaccggggtgatgcgctcgtgatcggtatcgcgacggctgacttccacggggacgtggagaaggcggagcaggtcgcggaaaaggccgccgacgaggatgccgacgttattttcgtagcgggagacgtgtccgacttcaacttggaggatcccgcacaggtagctgaggagatcgtggatgtgctgaaggagcacggccaggagatcatggccgtgcccggtaactgcgacactccggaagtcgtcagagtcctcgataccagcggggtctcggtacacctgaaggtcaaacacatcggtcgctacgacgtggtcgggatgggtgggtccaacccgacgccgttcgatacgccgctggagttcgaggaagacgtcatcgagtcgaggctcagggaactcatgaactcgaccgatgagccggtgatacttctgacgcacgcacccccgaaggatacggcggtggacaaggtcgaggccggtgaccacgtgggcagtgaggcgatccgaaagatcgtggaggagttccagcccaagcttcacatctgcgcgcacatccacgaggcggcgggcgaggacgagctcggtaacacccgggtgatcaaccccggcccgggcggtacggtggtagtcgagctgtgaaggtcaacccgaaatttccttgggaacgagaggtgatcgaattcgtccggacggagatgtccgaggtttcaccttcccacgacttcgaacacgtgaagcgcgtagtggggctctgcgagttcatcaggcgcaaggaaggaggagatccggagatactccgcgcggccgcctggttacacgatattggaaggccggcggaggagcgatcgggtgaagaccacgcggaggtcagcgccgaaatagcggaagatctcctcccccgcgtgggatttccctcggacaagctaggggaggtaacacacgcgatccgagctcatcgcttctccacgggacccgagccgcagactttagaagccaagatacttcaggacgcggacaacctcgacgccctgggagccatggggatagcccgatgtttctgcgcggtcggagagcgggggacatcgctggaatccggtgtggagcacttccacgaaaagctactccgattaccggagttgatgcacactgaaacggcccgccgattggcggaggagagaaggcgaaggatggtactgtttctggagtggctggagaaggagtggcggatgaggagttaggggtcggccgacgggaggatggggatgacggggtttacccgacgcctccgcgacttttttaagactatcgaatccggcgtccgggggtgttctcgtggcggacgacgaggtgaaaccaatcgtccggatagccgatgtcgaccttgacgggcataaaaaggtcccgtacgcgctcaccggaatcaaaggtatcgggatccggatggcctacgcgatctgccgggagctaggcctcgacgaggagaagaagctcggagagctctccgacgaggagatcgagcgcatcgaggaggagatcaagaagctatcggaaggagagtccaacatcccctcctggatgtacaaccgccagaaggactacgaaacgggcgaagatatgcacttggtcggcgcggaactcgagatgacggtgaagcaagacatcgatcggttgaagaagatccgcgcctaccgtggtatacgccacgagctgggactcccggtccgcggtcagcgtacgaagtcctcgttccgccgcggtaggaccgtgggtgtgaagaagaagcagtagggggtaaaacaggatgggtgaccccaagaggccccgtaagaagtacgagactcccagacatccgtgggaagccgagcgactggagtacgagcggaagctgatgcgcaagtacggactgcggcgtaagaaggagctatggcgccaccagacgcagctcaagcggtggcgtgagagagccaaagagctcatggcgaggacggaccccgaagcgcagcgtgagcgggaagccctcttccgtaagctgtacgatctgggtatcttggacaagaagcccgaggaagccacactggacgacatcctcaggctgaccgtagaggacgttttagagcgtcgtcttcagacgatcgtgtaccgaaagggcctcgccaagaccccgctgcaggccaggcagctcgttgtgcaccgtcatatcgcgataggtgaccggatcgttaccgtcccgagctacttagtgtctcgcgaggaggaagaggaagtagactactccccgtactccccgctcaaggatgaggaccacccgatcaggtgcgaggcacgaggtgagtcaccagaagaaaccgcggctgaggagtaaaattcgggggttgacgaatggccgagaaggagggtaagaaggagaagaaagagcggtggggaatcgcccacatctacgcctccttcaacaacacgatcatcacgatcaccgaccttacgggtgccgagacgttcgcccgctggtccggaggtatggtcgtcgacgcggaccgagaggagagctcaccgtacgccgccatgaaggccgccaggcgcgccgccgaggaagccatggagaagggtatcaccgcggtccacgtgaaggtgcgcgcacccggtggtcacggtcctaagacgcccggaccgggcgcccaggctgccatccgagctctagcccgtgcaggcctgaagatcggacggatcgaggacgtcacgccgatcccgcacgacggtaccaggaggcccggaggtaagagaggacgcagggtatgagtcccttgcgcgtccgtctctacgactaccggaaagccgacgtcgagcgcgccacgttcatcatcgaggaaacgtccgcggagttcgtcaatactatccgccgcgccctttacacactcgttcccaccttacgcatcgaggaggtcatcatctacgagaacgacacaccgatgtacgacgaaatgctggcccatcgactgggactgataccgctgcgtgtcgacgacatcgaccagttcgagttgcccgacctgtgcgactgcggtgggaaaggttgcgagaagtgtcaggtacgggcggagctcgaagtagaagggcccaccaaagtctacgctcgggatctgaagttcgatcatcctgatgtggaaccggccttccctgatacgcttatcaccgaggtcggggaggaccaacggatcaggctcgaagttatcgccgtacccggtctgggcctcgaacacgcgaagtggaagccggtgagcgcagtcgggtacaaaggcctccccgagctcgagatcgacgaggataaactcaaggaaaagaagatcacgtacgagtgtccccagggtattatcaggatcgagaacggcgaagtagtccatatcgatgaggatcgtctccccgagtgtcggatgtacaaggagtacgagcgcgagaccgatggggccgttcgtgtccgtctccgtgatgacgccttcgtgttcaacgttgagaccgacggctcgatgtcgctcgacaccgcgatcttgaaagctctcgacgcgatcgagcacaagctcgagtctctgaagaagaacttgcagaaggaggtgagcggagaatgacttgggcgcccaccggacccactaacgtggaactaaggaaactgatccgtgacctgaagaaggcggcatgtgagtacaacgcgccagtctggcgagatgtggcggaacgcctgtccagacccaggagacagcgagctgaagttaacgtcggaaagctcgacggactagcccgccgaggtgtcatccaggaggaagagaccgttctagtaccgggtaaggtgttgggtgacggagtgatcacccagcccctacgagtggccgcatggagattcagtaggaccgccaggatgaagatcgaagccgccggcggagaatgtctgacgatccgtgagctactcgaggagaacccagagggatcgtacattcggatcatcgagtaagggggaaaggaagcttggtcgagtacgcccactcgaaacctgtcgacccggaagagtggaccgttatcgatgccgaaaacgccgtgctcggtcgcctagccagcgtggtggcgaagaggatcctcaaaggcgagaggatcgccgtcatcaacactgaaaaagccatcatcaccggcaagaagaacaccatcaaagaggagtggctgcagaaaatccagcgaggtgacccgaagaagggtccgttttacccgaggagacccgatctgatcttccgccgggtagtccgcggcatgctcccgtggaagaccaagcgcgggcgtgaagccttcaagcggcttcgcgcgtatatcggtacaccgagatgggtcgaggaggcgaacatcgagcccgagcgggttgccgaggctgacatgagtcggttgggacacctctggtacgtaactctcggcgagctctcggaggagctcggttaccagatgccggggggccagtaaatgggtagggtcgtccagaccacaggtaagaggaagaccgccatcgcccgggccgtcatccgggagggtgaaggtagggtccgcgtgaacaagcggccggtgaacatcatcgaacctgagatggcccggatgaagatcatggagccactcatcatcgcgggtgaggacatcgtcagtcaggtcgacatcgacgtgaaggttcagggaggcggatggatgagccaagccgaggctgcccgtatcgccattgcccgaggcctcgtcgagtggaccggtgacccggacctacgggatgcttacatggcctacgaccgccacatgctgaaaggtgacccgcgccgtaaggagccgaagaagttcggtggccgcggtgccagggcacggagacagaagagctaccgttaaggcgggtgtccacggatgatcataccgatcaggtgcttcacctgtgggcgccccatcgcccacctatgggagaagtacgtggagttgatcgaagaggagggaatggaacccggggaggcactggacgagctaggcgtagatcggtactgttgcaggaggatgttcctgtcccacgtcgacctgctcgaggaatccctcccctacacgccaccccggctcggaatgccccgctaaattcttaaacacgatcttctgggagtcctccggtccacgtcaaggggccgtggggtagcctggtctatcctccgcggctggggagccgcggcccggaggccgcgggaccccggttcaaatccgggcggccccaccccccaattgttacgttaaccgtaacgatgttggcgagtcgattcggctttaggactcttgtgcacaacgataccgcacaccggttacgaacgggataataccctcaagcccacggcgggatcgacgggtgcagggggtgagaccacatgcgagccgtagctacactcctgacctgcatgctggccctaaccggagccgcgtctgcgggtaagtacttcgaagtaacccagacgccggtcgtcgtcagcctgcagggagttccgctttccgacgtccgagtgaagttcaccgatgaaggtaagcaggtagtagagaacatactgtcaggactgaaggtgaaagtcgacagcgaggaggttcaggtgaccaacgtcgcccgcaagatcgctgaggcgcgcgagggcaacatcactaacgaggagtacgtagtaggagccctaggatatgaagtgcctgagggcaagtacttcgtaggttacctccaggttaagagcggcgaaggtgagacgaagaagtacgtcgtacgttacgaggaggagcagaaagccgtgatcaagtccgcgccagggttcggcagcttcaccgcgactgtggtccaggttctaggtgagtacgacgataagggtctaccgctgatgacaccatcgatcgatccgacggaggtgaaggatgaggttctactgtgcctgccggtgatcaaggagatcaccctgaagccggcagtgctccaaatggactggtacaagatactggagaaggcggagccgggtaaggtgttcgtgaagctggcccaggtacacgcgcacggtgagggcgataagatagaggtgatatacgcgccgacgaaggtggacgccctacagctgctggtgagcggtgaggagccgctgataccgacccaggaggatatggtatcgacgatcgtggatccgtacatggaagagctcgaagccgtagtggacacgaaaatcgacgagttcctgaagccgatccaggagaaggttcagggtaacccggctctcgagatcctgaccgagaggttcctgccgacgttcctgaagacgctggccgggaaacagatcctcagagtgaaggagaccatcgtaagcgccttgatgccgcacacccagtacgtcaggacgttcctagtgggtctgtacatgtcgcagtacccggacggggtgaacgtgaacacgttgatggcgcgcaaggccgcgtacgagtcgccgatgtacgagatcctggtgtcggccgtcaagacatcttacgatatgatgctggagtcactgaagagcacgctatcgaacatcatcgacagtatcgtcgaccagtacgcggacgagatcgccgagatggtgggcacgacgaccgaggacgtcaagcagaccgtcgagaagctcacggtaggcgtcctgaaggacctgctgacgggcgactacgtggactacctcatcaaactggtagcactgaacgtgctcacgagcatgggctccatgggtattctctagccccaaccgcctttttcgtgcctaacgttagcgttctcgtaacaattgggcggcagcttcatttacccagcgcgacgccacacctgtagcggcacggccgaaggaccggtgaggtcacgggtgttccgatgagccggtgctccgggcccccggtacatccgacggcggcgtcgggaggtaggtggtgagaatcacctccgatgacctcccgccctccagccgggggcacaatcgttacttcttcaaccgcgagccgtttaaggttccatacacgtcgcgttggagggcctccgtgtcgtccttcgcgaacagggacgtaatctccgtccgggatttcacccggaaagagctggaggagctactaagtcacgcggaagagatggaacgcgtgtacgaacgcggcggagacgacagactttccggcaagatcctagccactctcttcttctctcctagcacgaggacccgactctcgttcgaaagtgccatgcaccgactcggcggtgacgtgatctcattgggcggcaaagaggcggcatcgacggctaagggtgaaaatctcgcggacaccgtccgcaccgtcgagcactactgcgacgttatcgtgttgcggcacccgaaggagggtgccgcccggctcgccgcggaacttaccgacgtccccgtgatcaacgcgggcgacggcgccaaccaacacccgacgcagacgttcctagacctctatacgatcatgaaggagaagggacgtatcggaggactcagaatcgggctgttgggagacctcaaatacggacgaaccgtccactcgctggcgtacgctctcgcactgttcggcgcgaaaatccacctgatatcaccggaggaactccggatgccctctcacatattggaagagctcgagcagataggcgcggaggtcgaggaacaccgagacctagaggagatcctacccgacttggacgtactctacgtgaccaggattcagcgcgagatgtttccggacccggaggagttcgagcgcgtgaaaggtagctacaaggtgacgagggaactcatcgaagaacacgcgcggagcgatctggtaatcctgcacccactccccagggtggatgagatcgagcccgatgtggacgaactaccgcaggcccgctacttcgatcaggttcgtaacggtgtgatcgtacggatggcactcctcgacctcatcctcgggggcgggtgatcgtggccctcaaagtgaagagaatcgaaatgggtaccgtcctcgaccacctgccgccgggtaccgccccccagattatgcgtatcctggacatcgatccgaccgagactaccctgctcgtcgccataaacgtggagagctcgaagatgggtcgcaaggacatactgaagatcgaagggaagatcctgagcgaggaggaggcgaacaaggtcgcgctcgtggcccctaacgccacagtcaacatcgttcgagactattccgtggccgagaagttccaggtcaaaccacccgagagggtggaagggttcctccgctgccccaaccccaactgcatcacgaacgacgaaagggaacctgtggacactgtcttcgttagggagtccaaaaagccgctggagtaccgctgtcggtactgcgagcgtaccgtccgggaggatcagatccgtgagctgatacgccctagctagtctccgggaccagttaatgcgataaagacgagggggtgagtgaaagtcgggatacccgccatcatacaacctgatgggtaggtgatacattgtccgatccgaggttcagctacttccggaccttccgggaagtcgtcaggcagaagagtttctcgaaagccgcggaagcgctcggaataactcaagggaccgtcagtaatcaaatcgcctcactagagcggttcttcgacgcacgtctcttcgtccgaacaccggaaggtgtcgaactgaccgaagagggcgaaatagccctcgaagcgatcgagacagtcctggacgccgtagaacgcgccaaggacaagatcgccgctgtatccaaggaaccttcgggcaaggtccgcgtctcgaccagtacggtacccggcggatacctacttcccggcagtgtcaaagagttccgctctgagtacccgaaggtcgacgtgataatccgcgtgtgtgactcacgcgaggcgaccgagcacgtgctcagcggcgatgccgacgtagcgatagtgggaaccgacgcgttcgtgaccaggaagagcgtcgaggtcgtaccgatagcctccgaggaactcgtcgtaatcctcccgccggatcacgagctcgccgatgccatggaggtcagtatcgacgatatcgtgggcgaaccctacgtcaaccgtgagtccggttccggaaccaggagggaggtagagaagtacctcaagagtcacgggctagggttcgaggatttcaagatcgtggaggaggtgggtagcaccgaggccgtaatcacctcggtatctcagggcgctggtatcagcatcatctcggagcgggccgccaagcgtgccgaatccgccggtctgatccggatcgcccgcctcgaggatagaccccgtaggttcttctacgccctcaagtcggacaaaccgctccacgccagcgccacggaggcgttctgggagttcctcctcagcgagttccgtggaaaaagttagcgaggtacctggctcgagtcttcaacgcctcaagaggatcctcgaacccgtgtgaaggtaatccccctccctcgtagtcaggtttcacgggtgtcccgcgttccgagaccttcaccccgaggtcccaacacagttctttcacgaaccgtttctcggagcacacggtgcccttcaggggagcgaactccgaccacaccttcagaaccgagacggtgaaccgcacgaggtccttcacgccggatccggacagtaccccgaccctaagtccggtcttcagcgcctcggagaaggaggctaccgatccggggaccacgtgctcggcccggtattccacccccggatcgagtagatcccaagagaccaccaggatatccgccttggtccttcgaaggacctcgggattgggatcgaccacgtcgacgtcgaggctcagacgctccagtaatctggcgtagtacggcgtcgccacgaccctcaacgttcctcgacctcctccaggatctttaaatcgtgtaacaggcgatcgtagcgctctatcccgtcatcctggatgtattgaccgtaagacttcagccgctcttccgcacgtgccagctcgtaccctaagtacagggcgtgacggaggtcggacagcagtcccagggacaccgccgccgcccccagttccaagccgtcgtcggattctaagcgtaacggttcgtcatcgccgcatctatgctctaagatcaggacgccacggtcatggtccgtcaggatcacgaagtctccgcgcacgtctcgttgtggcttcgaggcgaagcgctcggcgtcgagacccgacgcgctgacactatcgacacgtttgtctttgaacacgacgaggtccaacccgacgtccttggggaaaccgccgaatttgtgggccacgtaacacatcctggacgccaccgcgagctcgagcgtgctcatcttggtcttcccgctggcctccggagtgaagattatagagcactccagttcgaccgcgagctgcgcgcagagggccgaagttccgggagaatcggcatctatgagctcgagcacgtttcccgcaccgaagaagagtggcgcctcagggaactcctcggccacggcgcgatatcgcactatcgattccacgatacctcccggtggatccatcactgggtccaggacgtagtcgacgtcgcgacgttcgcacagatcgaccagctctcggagctgtcggacggcgatctcgggtttcttgttctcggggactaaaaccaccggcacgtcgtactcatccgccaggtccacgggctcttttaaatccgggaacgcgttgagaaggatgtccgcgcccgcctcgacacccgcctcgagaatgcccgggtcacccgagtcgatgctcaccgcgacgcgatctcccacgcgatcccgaaccgtctccacgatctggcggacgtcctcgggagaccgctcgtggaatcccaggtcgactatttcggcacccagctccgcccttctctccgcttcagacgctgcctcctccggggaaaggtcatcagcgaacacctcggacagaactcgcggtctacaccctcgtgcgatccttacgggccccacatcgatccaactccgttcgggaatatcccgctcgacatcccgaaccttccgtcccagctcccgtaggatctcgtcacggagcagcacgcaggccggcacgtccttggaggggacgaatccttcctccatcttgcggaggaccaggggaaggtcacgggcttcccgggagctcagcctgaagtccgcgtccaaggcttcgtccagcttcctgacgtcgccacggaaccaacccggtagcaggatgtagtcgtaccgcgtgaggtcctctccgcgcagctgctcgatgacgaagcgcgtggtcatcagcgcggccacgtcgatgggcagtaccttgacctcggcccactcgaaatcctccgccgccttcctgacgtcatcggcggccagcctacctgtcaggagtagtaccctcacccgcgagttccccgagtcgctccgggatctcctcggggtgtcgtaagacctcgataccttcgatccgctccagtttcctcacgttttccgcgtcgacggatctcaccctcatctcgtactctagacctccgtgaatggcatcctcaggacaagcctcggcacacttcccacaccccacacaccgcagcagccggatgaacgctttaccgtccaccatgtcgatggcgctcctcggacacgcgtccacgcagattccgcatccctcgcatcgctccctgagcaccatatacggtgtgatcgtgcggatcttcccctcctcgtagtcgcacgggaccacccagacggggacgtcccctttaccagcctgcgccacagcgttcgtcaccagggtgtccgcgataccgtgtgcgatcttggccaccgtgttggcggtagccggtgatactatcagtagatcgtactttccgagcgcgaacctaccgatgatcgggcagctggcaccctcctctgactgcgtgaacacctcgcggtagaagccgcccgggcagatctcccgcaggtcgtcccacaacccgaacatccgaacgacttcctcacccgcctccgagaggaacgcactgatccggtgctcccgggagatttctttcatgatcttgaacgtctccaccaggaggtgcgcggctcccgttatcccccaacctatccggagtcccaactgtccacacccgtaaaaaagggatttagaacgcgagaagcagcaacggcaccaacaacacgccggcgaagaccataccgcaggccagtcccgcgaacctgttcacgttcagaccgaagtacagcctggcgtcacggccgaagaactggctggagtcccgtacgtcgttcacgtaggtgtcggctcggtccgtgtccgccatggccggggcgccgatgatgacctccttcagctcggacccttcctccgccaacgtcgctcaccctcggacccactgacaccggcaccttttcaacgttgcgacctcgtccgacccggggcgatgaggaagtgggtccggccgaacgggatgaggtgggctggcgttcccgagccctatacttctaccttcccaccgggtagaagcttcacgacgtcacccgtgctcagttcttccacgagatcgcgctcgggtctgtgaaacagcgggatatccccgagaacgcaccccaccaccaggatcggttcggcttcacgcaccacgatacccgccggtgcggtgcctcgatccgccatctccatcaacacgtacgatccgacggtggaaccacgtccgccgggtagaaccagcacacggcccgtcagcttctccccgcagagctcgtgggacggatcgaccacctcgcccgttttcgggtccaccccgcccaggaaggaaagacgttgtgaggataccaggacttccgcctccacgggctcctcgacgtcgacgacgggctcgcagcggaccggcgacacgctcaccccggacgtggtgctcggaggataccatcgaaaaaacgatcggggcgtcagctgcaccccgagatatcgtagtactctacgttcagctctaaccagcgacggtgacgccgcctcttcctccgcttactccgcgggcacgatgaggtctcgctcgcccgcgggctcgaactctcgcaacgcgccctttgcgaactccttcctcggtgactggcggtacccaccgtagacgtagaacttcgtgtgcttctcctccggatcctcctcgaacttctccttaagtgccttaataaacagcgcttcctccttgctacgttcgaccattcacaccacccctgatcgtactatctattacgatcaccggaattagtaggcatgctaaagtttaagttgaaaatgcgaggaagcggcgggcgccggttcgcgaatgttacaattagcggaacgatttcgtgaacgtgatcccgagcgagccaggtcttgggagaccgtagtccctaccgaacgggaaatcaaccgctaagacgcgacattatcgggggattcgaagatcccgtacgaaatcgacgagcgaggggtagcgcacgagatcgacgagatcgacttagacctgatggaagagcccgagaacctcgccgtcgtgccgccgtcatgcgaagccggaccgtgcggtaactcctgcgttttctgttacatcaggcagaacccacccgaggtgctcagagagcacggtggaaacgtggatacgactcgtcacgacacgttgaacgatccgcacctggaggagcgcgtcgagcgagcccgcgaccggtaccccgacctccgactcaggatcgtggacaccgcggggaacgtgggaatcgacgagggacgcgtcgagtccctggcggcggccgggatagacgaggttcagatctcgttgcacaccacggttccggagacgcggaagaaactgatggggaacccgaacgcggacgagttgttggagctgctaccgaagttcgaggacgtcggcatcgacgtcatcgccgatctagtgctcactcccggatacaacctcagggagctaccccgcacgtgcgaagacttggagacgatgggggccaggcaggtccgcgtgtttccggtcggaggtacggacctcgcccgtgggttccggttccccacccggagggagttggagtggatgcgagagacctcccggcgattggattgtgagctgaatattgaggtgataccctcacctacgatcgacgcgctgctaggtgaacccgcgttcgacccgccggatctcccggaaccggacttcgaggccgtaatcgtcgtcggtgaactggccgctcctattttcgaaccggcggtccgagagctggagaacgtcgagctgctcgtggtgaagaaccgggtgttcggcggtgtgatcggggcgtcgagcctgctcaccgcgaaggacgttctgagggagatcgagcgttacgagcctcggacggagttcccggtcctgatcctccccgacgccatgttcagtcccgacggcaggacactcgacgggtggtcccgcgaggagttagtggggaagttagcggcgctcgggtacacggtggtgacgtgcagaaaacccgaagaggtcgcgaaagtcctcgcatccccctcaccgtggtgagccctccgcaaacgctcccttcgtcatccgtccgtccggggtgggctcgtcatcgggcgcgcggcaagccttttggtggacccgcacccgtcaggtatgctcgatccccacaggcgcggggtttgaacttgcgattgacggtactctccggtggcaccgggacaccgaagctgctccggggcttgcgggagctagaggcggacttctcggtgatagtcaacaccggagaggacgacgagatcctcggtctgtacgtgtccccggacgtggatacggtgctatacaccctcgccggcatcgtcaacgacgaaacctggtacggtatcaaggacgacgggttccgtggacacgagttcctggagaggctaggagttgacgagcccctgaggatcggtgacgccgaccgcgcgctcaagcagtaccggacgtacctgatgcgggaaaagggactgaagctctccgaggccgtcgacgagatccgacggcggctcggtatcaagtggaaggtgtacccgatgaccgacgatcgggtcacgactatagtcgagaccgacgaaggggacttacacttcagggagttctgggtcgagcggggcggcaagcccccggtacgcggagtgaggtacgagggggccgaggaagcctccccgccgcccgacgccgtcgacgagttgcttagggccgacgtggtcctgataggccctagcaatccggtgacgagtatcgggcctatactatcgatctccgaaatccgccacatcgtccgggagaaacccgtcgtgatggtgtccccgttcatcgggcgcgagcccgtgagtggtcctgcgggtaagctcatgagagccgtcggtttcgagccctcggtccgtggtctcgtggagtactaccgggagtggggtgtagaaccggacgtcctgatcatggacgagcgggacgacgtggaactccccgagggattggaagtcgttcggaccgacaccctcatgcgcgatgagaaggactccgtgaggctagctcgcgaggtcctccgtatcgtggaggaattggtggggtaacacgatgtcaccacgactcgttgtacccgccgccgtggtcgtcgtcgcgatcggtctcctggcttattggtacctttacccctccgagggggcttcggaggtgcctatcaaggccaagatcgagctccccaagcccctggagctgaaaatgtcggtgtccgaggcgttgaagaagcgccgatcgatccgcgagtaccgggacgaatccataaccctccgagagctcgccacggtgctatgggccgcgcaggggatcacggatccgcgcggtttccgcacggcgcccagcgcgggcgcgctgtacccgctgagagtcttcgtcgtggtccgcaaggtcgaagggttggcccctggcatctacgtgtacgatcccaagacccacacgctcggtctcgtcaggcggggtaatttcacgacggaactgcagcgggcctgtctcgatcaggagtgggtgggccacgccgccgttgacctcgtcatcgtcgggtacgagcgggtgttgcaacccagatatggcgaacgttccttccggtacatggcgctcgaggccgggcacgtcggtcagaacatctacctggcgtgcaccgcactgggactggggacggtcgcggtgggcgcgttctacgacgaccgagtgaaggagatcctcgggataaccgagggggacgccgtaccgctgtacgtgttcccgataggacggaggtgatcgggtcagcaccctcgggacatctcatcccgatcccggtcgagctggggctaatctccatcatccccgagagcgggtggatcccgtgggggtagcggttcgggacgtcgtcaggtacgggcgactgaagctcctggtgttcgagaacgtgtacccgcctgccgaggattcgttcctactcgccgagcaccaaggggtatccggctccgagcgggtcttggacgtcgggacgggatgcggcattcaagggttatcggcggccgcgaaaggctgtgaggtggtagcgacggacgtcaaccccgcggccgtccactgcgcacggtggaacgcccacctcaacgacctgaacatcgacgttcgtgtgggagacctgttcgagcccgtccgcgatgagcggttcgacatcgtcctgttcaacccaccttacctacccggccgtgaactgcccggaagcgatcccatttcccgagccaccgaagaccccgccgtcatccgccgcttcctaaaagatctcctccgggaagagattcgctgggacgaggctaggatcgtcgtgtccagcctgaccccgaagaagtacctggaacccctgcagcgtttcgaggtggaaatcgtggccgaggaacccctgtttttcgagaagatccgcgtgctcgcgcttcgaccgtcccgatgaaatttgtgcgagcgtagtgaggagagcgacacggtaatcttccgacagtcaacaccacctccgcgggggtgagccggttgttcgtcgtcgtctactcgacggccgaggatgaggaagaggccaaacggatagcgcggaagctggtcgaggaggacctcgccgcgtgcgtgaacctctggccgatacgatccgtgtatgagtgggggggcgagctatgcgaagacgaggagtatgccctcctcgtcaagacgaccgcggagcgtgcggaggaggtagtggaaaggatcgtagagttacactcctacgaaacgcccgcggtactggtcttacccgtattgggtggattcgaggggttcttggagtggatccgagagcaaacccgctgacataacggcctcaccacggtcattccccgagccgctcgagtacccaccgcagcttccgttcggcctcctcgtacgctcgcctgacccgctccttcatttcttcgaactcctcgggatgctcctccccgatgacacgtttcaccttagtgtacgcggtttcccggaacttcacgtccagctcgacttcctctccgtcccgttcgaggacgacgccggagccctcctcaacgcgaccaacgacgtccgcccgcaccccgacgccgttgagggcttccacgcaccgttcggccacgtcttccggtgcgatcaccatgagcatgtccagggatagcccgaggtaatcgatgtcgagttcgtcgagcatccggaggacgcgatcgttgacgagggagcgcacggtttcctcgtcgaaaaccaagcggacgcccgcggtctcggagatctccgtcgcgtccccccggatacccccgttcgtgatgtcagtcatggcgtgaacctcggagagcaggttctcctcccggagcgcctcaaccgcccggacgaagtccacgttgagggtctcctcaaccacgtcgtagtacccgtggtagatcgctgtcgtggagatcgtaccgccgcccgcgccctcggtgagcacgatcagatcacccggctcggcatctctccgcggtgtgagctcgtccggccgcgcggtaccgacgcaggctacacccgcgaccaggcgtcgccctagcaccatgtctcctcccacgcgcagggtgctacccgcgagtatcggtacgccggtcgccgcgcccaccgcggtcacacccgctgtgaagtcgaaaagacgacctacatctccgtcgtcggctagatgcagatcgacgaggagaccacgaggacgtgccccgttcacgaggacgtcccgcatggcggctcgggtcgcgtggaagccggcgagaaaggggaactcactgagcctcgagtgcataccgtccacggcactcacgaggatcacctcgtccgggtctatacgaacggcacccgcatcgtcgcgctcctcgggcgatactagcgcgccttccgaggccttagcggcgagcctagtaagcagctcgtggacgaagaagtctccctcaccccgtgatcccactcccatttcgcccatgcccacgcccgattcgggcgggcgaaggatgtccccgactctccctccgaggaagtgagccttccggacgtggtgtacttcctccagaacggcgtcgacgaactcgcggatctcatcttccgaccagtcccgcttccagatcttcaccagatcggtgagtagctcccgaatctcatcctcggatgcgccagcctccagcatgtgcaaggataatccctctaggtccatgggagtaccccccgtagggcgccgagcgccctgaagcttatagacccgattctcagcgcccgttcgaccgtcgtgagtggaacacgacgttacgcacgagatgtcaacgtcgtccacgtatagactcctgagtcttgtgcattgtactttccaggtcccaagttattttcctgttgccaattagtagtaacgttatgttttcagttagtaagttataagtatgccgtatgaagcctcttgagctgcagaaagtaatggggaaaatcaacaaatgtgtgccaatataatcatcagaatacaaacttaaagatctcaatttgtagtgttagctaaatatgttacaaactcaatatctcgtctacttcttgtgattcatgcggtagacactacaggctcaggacagcgccaaatttaataccaagtaccggcaacatgtttcccgcaccgggggtatcggtacggggtagggatagcactcctagcttaaaggatagtgtaccccctatcccagtccgtcgagatggccggttcgagaagaattccacgacgtcacccggggtgaggatgaaggtgagcggggctgaactcatccgagagctaatcatggaactacgggccctcaggcacgaaatccacatgctgagggtggaactggagaagttacgtagcgaggtaaacgaggtggaacccgacgatgacttctcggagctcctcccacagtctgaacacgtcccggaggttgtgatcgaagacagcggtttaggacccgactccgtggccggggaaagatggcggctgttgtaacggtggtccgttgcgcactccctaggtagacgtcatcctgaccacatacctcaaacgttgtacaacccgataccacacgttaccgttcgaccccgtacggaaggccctgacggacgtcactggtcctgccacctgagcccctccagttcgtttatcacgcgttccaacgaccacttccgtgcatcctcggacagttcggcggccttccttagggtgggacccaagagctccgccgcgatcattcggagtgccttagtcactcggggtttaccggtggagatagccagtacagcgtccccactccggagtacggaggggaaccgcactttcggtctcggagtgtcgacgcggttaacgagcgacaacgccctttccaatcgggcgttcaagtccgggtcgtccgtcgccaccacgtaaaggtccgcctcgggtagatcttcaggccctttcaccttccgacgcacgaacctcacgggtagatcacggatccactcagactcctccggcgcaacgacgatcacgtcgaccccgagatcgaccagggtgcgcgccttccgttcggcgacacgtccaccacccacgatcaccgcccgctcaacccggacgaacaacggtacatacggcaagctccgaccccgatcgaccctctcatcgtccgcacttgaaaccgctcgacttcgggctcggcgtgtcgaccgtatattctcccaagattccgaagtggacgggacgacgctcacgcgttcgggaacttcctgtcccagttaggttcttccagcagtcgctggccgtagacctcgcgtcgatgctcgggcgacattctgagcaaattgcgtagaagttcgggggcgtccttggtcttcacacggagctctgggttaagccggggcgttcctactaccccgtggacgtccacggggatgagacccaggtattcgccggaaaccaggtcgaaggaagcggcgatacctatccgggcgtccccgcggagtatggtccgctgcatcgcctcgaacccgcacacgtaccgttccacactcggctcgacgatctcgaaccccgcctttttcaggatctctttgagctccgtgtcgtatttccgggccgccttgcacttccggttcggcatcacgacggcgttcgagtgtggttctcggatcggctcgggttcctcgggctccacctcctccacgtcgggaaacagctcgaagacgcggtcgatcccatcttccggtccaccgaccactaggacgtcgtctcccggccgtgcatcgactatctgtgcgacccatggtgttatgcatgtggaggagaggcagccctcgggcgtcacggttccggtgatggcgttgccgtcgacgctgacgcggaacccgacgagccgtttgagctcgaaatgcaggtgcataggagcgtggccggtcctgaagacgtagatgcggtcgggatcacccatgaacagccacctggggtctaggatgtcggtggcgtccacgtacaccgtcaacgatcactctccccggtcggtcaggtacaccgcgggcccgtacgccggcatcatccgatcggggaagcgttccggatcgcgacctaactgaaactcgggcttcttcggtcctaaggagacgatgtcctccagctcgtcccaatccatcggtgagacgttgtggcaaccgtgaccgccgtcccggtagacgtcctcgttctcgagtttaccttccacgaactcgcggatctgcctctcgaacttctccgacgataaccggatcgtgtggtgctcgtagacaccgacgatcctgtcaccgtcgaagaggaacgccgttacgtgccccgtcccgtagtcgatcaccaggagtctgtccgcgtccgagtcgacacgcccgagcatggcgatcgggaccttcgagtccatcgcaacggcgtcgacgcccgccgattccgcttccatgtaggccgcgcgtagtcttgggaagctctcgggcgggacgtcgtcgaacgtcatccgatcgggcctgcagccgttcgccccgagataccggcggaacagtcgctcgaacctgtgcttccggttagactcgtagtccgggtggtaaccgtggtcctggacgcaagccacgaccgtctctacgccgtccatgtcgacgttcgaacgctgtagcgcctcgaacacgtccgaaacgcggaagtcgtacgtttcgaccacgggggaatccggtggaacctcctcgatggggtcctcgacgatatggagacggggcatttcctccaacctgcgcacgtcgttatgaagcgtcagcgccgcatcgagctccgcgtagatctcggtgccttttttcatgagtctcttgaactctcgagtggtgggtcccccacccatggggacgccgatcagcgccaagtatctcggcggttctcgcagcatgaagcgcaacctctgagctagcgtcgatacgcgcgagggtcccacgaaccgcggtgagtactcgggatccccggtgtaggccaccacgtcggtcgttcctactcccacgtcgatgacgacagtcttcacctcaccccggaacgacacgggttccaacgaactcctccccacgcatggctctcaagaggttgtccgggtttcctgcgtaaacaacgcggagctcgagatcgtactcctccgcgagccggggagctacggggtccaaggcggtccagttcccctccagctcccgggcatcgatttcgcggatcagagaactgggatcgtccggatcctccaggataccgggcacatccttggcgaacacgaccaggttcgcgttcgcctcggctgcgacgtacaccgagatagcgtcggaggtgatctcccacgaatgtggtaaagggtccttcatcctgaggtaacggtacggcagtaacaccagtttgccgccgaactcgggctcctccgtggtcggcaggtcgagtaggtccgagagcaggtacccggtctggtccatcgcggctatcgccatccagtgggccgcgtcgtcggacaggtccccgtcctcgtagacctcccgcacgatgttcgcgaacctccatcctcccggtactactaggagctcgccttcgaacgcggtgatagcgttcttcacggcgtcgacttccttcactgccccggttcccgctttgaggactaccttcacgatttcagcaacccttccagcttgtccctcaggatacgcacgtcggtgcgttcggtctcggtttccgccttccgctcggctctctcgaggaacctaaggatgcattctgggtcttcacagcggtcgtacgcttcctcgagtagtctgcgcgcttttttggcgttctcgatgtaaggccgcgcttccacgtagacctctatcagtaggtccttcagttccttcgaggacgacatccctcaccacccgcacgaccgcgtcggcgacgctcttagcctccggggacatcggaccgaatcccgacttcacggggacgaagcctatcagcagacggacgtccatcagctcgtcgggaggtggcccgtgggaacccctgtccggaccgagcctcggctcctttaccaccaccagtgtaccgggctcgcgatcgacacgcaccgtgtcgactaggacgacgggctcgttcggtagtcgaaggcgctcgagccacacgccggcggccacggctttgaacttgtgggtcttgaggggagaaaggcgtcgtgcgacccagtgtccgaacccgtcatccgcggccaacgggttgccgagtccgactagaacgaagccttctcccagcagttctcggaggtagtctcggaggggatccaagggtccgatcatccacccagcaccctggcgacgagctcgaggaaccgtgagaccgtctccgcgtcgaggtgtggcatcatcactatcctgactccgagaggcttggtggaaactgagatcttccaaccctcccgctccgattcccgcaacagtcgttccgcggtccctcggtcgggcaaccggatattcaccaagttaagatggggcgggtccacggccagctctaggccgagttccctggccttctccgcgactttcagggtctcttcgtaacatctgaaggctatcctccggtacccctcttccccgagctccaatatgttcgcgtagagcgccagaaccggggctccgggtcgtgtgccggtgatggtgtactgtgacgccccacctcccgacaagtaaggcgcgtacacctcgatagctttcgggaactcgtcatctcggaacacgatgccgcccgctggcggaggtaccagccccattttgtgaggatcgacggtgacagataccaccgcctccagatcgaagccgaaacgtggtagtgggtactcctcccggaggaacggtgccgtgaagcccccgaacgccgcgtccacgtgaagcggaacgccgtggtcctccgccacgtccgacagcgcctcgatgtcgtcgacggaccccgtctcggtggtaccgacgataccgacgatcagcgcggtatcccgggaaatcaggtcctgaacggcgtctacatccacggtgtagtcggacctcagcggcgcctcgacgagcttcatacgtaacatccgtgcagccttctcgaaggagaaatggcgagtggcggggacgatgatttccctaccaccggtgacctcccgagccgcgtacgccgccaggatgttggcttcggtgcctcccgatactatgctaccttcggcctcctcaggggcggggtggtcgaggagcgtctccgccaaccatccgatgcactcacgctcggcgcggtacgcgttcggaaagaggtaaggatcacccaagttgacgtgaagcccagccacgaacgcttcggcggcgacggggtgcggttcggtgcacatggatccgagcacggtaccgtcggagtaatccgagtcccgctggaggatcacacgtactggatccggtattcggctccccgccgttccgccttgtccctcgccctcctcagcatgggggtggtgatcactaccaacgccttcagacccttgagcgccgccatgatagctccgtccaccaccccgaacttcaggtctggttcgatcccgagcatgttcagggcggccctcgccgcagtgcccgccgctccgatcagatcgtagtcctccttctccagcacttctttcagcctgtcgaggtccagtttgcgagtccctccttcgcgcgcactcgggacgcatacgaacaccacctcccctctctcgagccccgggatgtcgccctcaatgttcgtcaccggcaggtcttgtcctttctccgcgtcggcttgggctatggctcgtgctccggttttacgactcttcgacgcgtacaacagcccgtcttccatgtacaggtaaatctcttctcccttccggatatcctccgcggcgatggccgcccacgtcatgcgcttccccagagcttccgcgattttagccgagaacctccggatattattaatagattcgagagctttctcggcccctttatcagtcagaacgtactcagctcgaccttttttctctaccaacccttcatcgataagttcctttacgtagttgtgaatagcctgtaaagagacccccaactcgcccccaatgtcacctaaatgaactctaggttgacgcaatccaataaacgccaatatcaaagatttcatcagttcacgtctatcttttagctcattgggcaccctgatgggcccttcttccatttcttattcaccctcactcgaaactacagtcagcttagcttgttccacccctcgaactccacgaatgcgcttcgcgagctcggcaatgcgctttccaggtccttgtagcagcagtacctcgaggcacttctcgggagaaacgtgtatgtgcgtcgtcgatattatcacatccgtgaattcgtgctgcactttcactagctcgggctcggcgcgctcgtgctggaacacgtacgtcagggcgccgaagtactcctcatctcctacccgctcggtccattcgatcctctggaggtactcccgtagcgcctggcggaagatctccgaccgactcgcaaagtatcccgaggctattagctcgttgactttctggagcagctgctcgggtacggttatcgaggttcgtactaaattatcctcacctttgttcacccaaggatccccccacacggccggttaatacttgataacaccatcatcttgaagtctcgagacctattaaagccatcaggatcgcgagctcgcagaggtcttccctcaacaccttcccgttggatagtacccctatcgcaccggagcgcttgcctatctcccggactccgacgagctccgagaagacttctcctacctcctcacccgagagcgcttcctccgtgacgtcgggaggcagttggaaccccgggctcgttcccaccgtctctcgtcctttggggtcccgcaccacggccacgtggagatccacgtagacgtcaccgactcttatcagtccggcttccaagcccacagagtagctacctcggttccacgcctcccgagccctgttcttagcaccctgatgaacctcctccatccccacgggttgaggtggtacccctgggtcgacgctcaccgcctcgacggtgatctcacggtccggaaacgttctgagaaatgcacgctccgtcgcccggactttcacggggttagtcgtcccgacacggaccttcatccacctctccccgcagccggctggaggatatcttcctaccgtcaccgtccagcacgaacggaatgacgacgatggataacggtggaaaaccgcgcttcctcctgagctcgttgatctccaacgccaccggttccgtctccggactcacgacgatcgcgtccatctcgtcgtcttccagcgtcgtgccgtagcgatcctccaacggaacgatctcaactcgatccgacgctcctttctcctcgacgaaccttcggacggcccgcaccctctcctcgaagggttcgacccctttcttcccctcctcacggacgaaggagtccgtcgtgacacctatcaccactcggtctcccagctcgagcgctacggacaacaggcgctggtgacccaggtgtaacctgtcgaatgtacctccgacgaccactttgcggaacctggccaagggagtcaacctcctaagatgtcgtatacggccttcagcgcttcacctacctccaagaagccatggcggagttcccggagtactctctggatcgaggctcttcgtaggtgcgggtggcgttggtgaacttgatgcaggaacggacacgcgtacttatagtcgtgaaactccgggagaacctcctctacgaggcggcgtagctcgaacttggttttcgccagggccgcggggacatggagtttgaaccgatcgtcctcgggttgcacgcagtgatggcccgtgggcaatccgtccccgaacgctacgacgtcggtatcggcttcccccatcactctcttccgaatcttagcgttacagcgcccacaagggtggaagcgaccctcattcagcgctccctccacgacgtcggacaggtcttcctcgacgaacttgggttccgtgccgaggtactcggagagtatctcgacgtttctgcgcagcttaggcggtaagaacatcggacccgggtctaccgtgacggactcgacctcgtaacccagctttcggagtattatcgcggaggccgtactgtcgtatccacccgacgccgccacggtgatccgcatgtcgcggggttcctctccctcccagcgttcccagtaatcccacggcagctccccgtggagcctggctttctctatttcgatcccccgaaggacgccctctaactcgggctggcggcgggagtaccgctcgaggatctcacgcgaggcatccaacctcaacagtctcaccttcagatccgtccaggcctggacgaccacgcggtctataccgagctcctctttaagtctgccggcgacgtatccacccggaccgatgaagtaagacatgtcggaacgatccctacctacgatcactagcgtgccgtcctcctcacgtacgtccacgatgtcgggttctcccttccccttcgttcctatctccttcctcagcctgttcactaccgtcatcagctcctttttcacgctgctttccccaccgcaccggtttgggttcctttcggtacatgagctctccaccggggcgggagataccgatcttctcgaggaccgaatgcgcatcctttacgatcacgacgagagaatgatcgtcggagagtatcttcgcccgcccctcgacgatctcgacgctgtccccaaacgtctctttaatggtgtccgcgacgatgtacttgtcctcccccgagatgtggatgcaaccagtgtccttgttgtagaacacctcgccctgtagcccggatttagctaccgcccgcatgatcacctgggcgagctttctcgtgaccagcttccggttgaggatcctgacggccagctccgattcgaggtcccccgccacaacttcaacggagtcgccgacctcagtatcggtcgcgctgacgatgccagccgggagctccacgatctcctcaggaggttcttctggtacgtacactcgccatggcttaaggcgctcgaccacgtccaccacttccccgtccgccaggaacaccacgtcgatcgggaagcgcatgaagaaggtgtggatcgcgcagcgtctgcgtccgcggtaagggggcttcaggatcagcccctctccctcctccaaccttcgacggaacatcaacccccgaagcctcgcgaggaacgactccgcgatctcggcactgtgagccagtacggtacccttgctccggttaatcaccgcggctttcaattaacgcaccccggggggtgcgactttgaacttcgtcgagacgttccgtcgagccctccgatgcttacaaccgtcggcggtagtcgtggacttcgatcctccagccgaatcgctccgctccactccggtcatcaagctcccctccggtatactgcactcagtgggtcctgttgaagcctgcgccagtttaggcctgaaagagggagaacccgtgctcatagcgtcgtattcccgatgtagtctggagttccgccccatacgccccgaagaggcgcgactggcggcactggatcactaccgcgtggtcagcaggatattggaaactatggtagagctggcggttgagggggtggaaggagatcgggtaggtaccttgtgcgtgatatcggaaggtgccgatcgaatgtaccggaccacggttccggtcagggtggaggatgtcaacgtgatgacggggtcgggaaagcgcgttctcaaggcactggctaagctcgacggtgctatcgtcgtggatccggagggcaacatcgaggcggcgggcgcgatcttcgacgtggattccggaagtgtggagcccggatttggcgcccgacacaccaccgcgctccacgtctccaaggagctcaactgccccgtaatagtattatcagaatccggtaggatccggctgtaccacggcgggaaggaggtcctgaaaatctcggtctcagacctcgtcgctattcgggggttctgcgatggttagaaacattgtcgtcgagaccatgaaacgcagtcctttcaccgaaaccgaagtggagatcgtcgagcgaaagggtgtaggacacccggacagtctcgccgacggtatcgcggagagcgtatctagggctctgtgtcgggagtacatcgagcgattcggccggattctacaccacaacaccgacgaggttcaaatcgtggcgggtgaatcgagaccggagttcggaggtggagaggtaatccggcctatttacatcctggtaaccggacgcgccacggcgtacgtaggggacgaggagatccccgtcggcaccatcgcgctagaagccgcgacggagtacttggaggagaccgtcagacacctagataccgaaaagcacgtggtaatcgagccgaagatcggtcacggttcggcggatctgcgggacgtgttcgagcgcggtgaggaagttccactggcgaacgacacctccttcggcgtagggtacgcaccactgactaccactgagagactcgtgtacgagactgagcggaagatcaactccccgaagctcaagaaggatctaccggaggtcggagaagacgtcaaggtcatggcacttcgagaggataacaagatcgaactaaccgtggccgctgcgatggtgtcgcagcgcatcgacgatatcgaccattacatctccgtggtcgaggagctgagagaccgagtcgcggacttagcggccgagatcgcctcggatcacgacgtcgaggtgcacgtgaacaccgccgacgactacgagcgggagtccgtgtacctgacggttaccggcacatcagccgaacagggtgacgacggttccgtcggtcgtgggaaccgcgtcaacggtctgatcacaccgttccgtccgatgagcatggaagccgccgccggaaagaaccccgtgaaccacgtcgggaaactctacaacgtactggcccaccagatggcccgggagatctacgaggaaacgtcagccgatgaggtatacgtccggctgctcagtcagatcggtcaccccatcgacgatcccaaggcggtcgacgtgcacctcgtaggggacgtatcggaggaggacgagcgcgtggctcgacgcgtggcggacgagctactggagaacatcaccgagctcacggaacgtatcgtggagggcgaaatcgaggtgttctgaagcgacgcctgtaccgaactgaacaccgccaagtcacgcctcggcgactccggctacaggcgatgatgtggaccgtccgcgggttcgaatcctcccagaactcgaccaccttcgatctctccagcgatgttcgtcctcatgagcctctcgacctccttgatgtcgtcggttctatcgagcacgtacatgagcttcacgtaagccacctctggcagcatatcctcacccggtatcacacccacagccctcagcagtcgtccggtcctgtacacgttcatgttcacacgaccgtacaagcactgagatgtcatcacgacggcgatcccgtcgtccaccgcccgctcgatcgactccaaccactgctccgagacgtggcccaaaccggtgccttcgaggacgatcccccggtaaccccgatccacgtagaagtctaagacctcgggatccataccgggtgcgaacttcaccaaggccactttttcctcgaacccgcctgagatctcaggctcaccgtcctccggcctccggtaatcgctccggaggaactcgattttagggttcctgagatccttcacgtccaccttcgcgatagggatggactccaccgacctgaacgcgtccctgcgtgacgtgtgcatcttcctgaccctcactccccgatgcacgaggcatacctcatcggaggtccacccgtgcatgcagacggtgacctcacccacctctccgtcgcccgcgaaggcgcacgccgcgatgaggttcgaggccgcgtccgaagacggcctgtccgaactccgctgcgctccgaccaacacgaccggcccgttaagcccctcgatgacgaacgatagcgccgcggccgtgaacgccatcgtgtccgttccgtgtccgatcacgacaccctctacatccgggtccgagagagcgtccacgacctcttcggcgatcttcatccagtgtttgggctccatattctcgctgagcagatcgagcacggccctggcgtctacgatgttgatcacgtcgagcagctccgggaccgctccgacgagctcctcggctgtgaacgcaggtttcacggccccggtctcgtagtccacccggcatgcgatggtaccgcccgtcgacatcaccgatacgttgggaagcttaggatcgtactcgatctctccctccatcggcttgaagctaggttcatgtccttcacccggggcttcgagcttctcgatcctgtcgacacgtacccctacattgtaaccgttgtccattttgacgacgatgtgctcatcgtctccaagttccgacctgggcatgatgatgccttccacgaccaccccatcgtcccggactatacgaacccggtcgccgacactcagcccgtgctcccgtagtaactccccggccttacctttgtactcggacaacaccctcaccccagacccatccttccaagggggactcggcttgaaagtggcgatagtagagtacggcgtcggcaacttgaacagcgtgtaccgcgcggttaaacacttggggcatgagcccgtcgttactgatgatccctcggagttgcacgacgccgacgccgtgattctcccaggtgtgggaaacttccgcgccgccgcggagaaactcgaagagaccggattatgtgacgagatccgagagctgctagggtccgtcccactcttaggtatatgccttgggatgcagctcttgatggaatcgagcgaggagagccccgagtcacgcggtctaggagtgtttcggggaacgtgtgtggcgctccccaatgacgtgaaaacgccgcacatgggatggaacacggtggagttccggacggaagagtttcgggagttcgacggtgagatgttctacttcgtccactcgtaccgggtggctcccgaggacgacgtcgtcctaggtgagacggagtacggggaacggtttccaagcgtgatcggggaccggggtagactgatctacggaatgcaattccaccccgaaaaaagcggaccagtggggttaaagttgctcggtgaggttcttacgggggcgagccgttgagaatgtcccgcgagagaatattccgagaagttaaagaatccctgaagaacatccaagaggtgagatccgagctaggtgacaatgtgtcgctgtcgaccctgcgttacatcctcgcatcgatggtcatcactctgggtcgaggggtcggatccaccttctacagggccggttacgacatcggtgtttacaaggcgaaatcacacgacctgaagggcatcgaagaggccttcgagtacgtggagaaggcgttcgagaggacgggcacaggcatcatcgagcgctgggaaatgaaagaagatggtaagatcgaaatcacgatgcgcgagtcagcaacggctgccggttacgacatagggaagaagctgtgttactaccaagccggattcatcgccgggatcctccacggggctaccggcgagcgctgggaggtgcacgagaccaagtgcatggccgaaggtcacgaccactgtgagttcgtggcgatacggagggggtaacgtggagcgggtcgtcgtacatggcacactgatggacgtgttcggggtaggggtgcttctggtaggtccacgtggggtagggaagagcgagacggccttggaactcatacgtcgcggccacaggttggtgtccgacgatgcggtgatcgtggagtgcgatgatagctacgagtaccccgtcggcagaccgccggagaacttagccgggaaaatggagatccgactcgccctggcggagctgtactgccccgagtgcggtcgagtgtacacattctccgccctcaagatgaaggaagggtgtgactgcggtggcgacctgaaactacgtcctattcaggataaaatcgccgtggacgtcgcggaactctacggcatccgggcgctccggagccgtaagggcatcggtgtggtcattaagatgatcccgggcccccaccacccccatcacgatccatccatgagaccggatgaaccagtctcctccacgccttccgaggaggagaaggtagtgaaatgggtgaaagagagggatggaagggtgttccacctggacgtggttccgggtcgagacaccgccacgctgatcgagaccgtggcacttcaggagagcttgaggcgcaggaggtgaactgtggtgctgtcgatacccgattggctcggtgccgcactgttgctttcactcagtgacgagctgcacaccggtctcgtgtggggagcccttcgcagccagtaccttctgttgggagcgtacctccgggtccgacattcagctctattcgtctggttagtacacgaaaccttggagttccttttccacactgtgatcctgtcgttgatacttccggtcccgatggcggtaacagcggcctcagtacacttcggaatcgacctatttcacgaagcgctgttaggaaccgttaaaggtcgggtgacacaccggctgatgcacctgtctttggaatccgcaatattgtactggctgtgggggtgatacttgtgagaatcctgcgcgatctcatcggcaaacccgtaatcgactccagcgccaagcacatcggtgaggtcctcgatgtcgagttcgacgaagagtcaggagaagtcaccacgctaatcgtgggccactccaagcgccccggtgttctgcggaagataaagtggctagggggcgaggagaaagccgttcgcataccctactcgaatgtcgttgccatcgaggacatggtgctggtagaaggacggtgggtatccagggaggactgactcctcgtcttgcgggggtgggggtttctgaaccccacccccgaacggttcacttgttctcgccgttcgtggggttatatcggcgggctgtcgggatcgtcacaacccccaacatctcgaaacgatgaggagggtccaggggcgatctctacgggcgatctatcgtgacaacgcggtctccccgcccttccatcccagaaggactcccccaggggttgtgatccatggacgaatccgagatcctaagagtactccgcgactgggtctctgacccttttgaagcggtactcgtggatgacgtgccggtggacctgtacgacccagaagaaggccacgcgtacctcgtggctaacgaggacaccgtagagaagaaactgggtcgactcacgagactcatcgggaaggtcccgaaagcatcgatcgcgtactctggggacaccgacgagctcgtagacccgctgaggaggctcggtgcgggcctcctcgaggtctccccggagggtgtcgaggtcgtgctcgagcccgagacgttcgatgtcgatccggacatacgccccatgtccggacatcatgacgagctcgtcgccgtcctgaaagccctcggagatgagcgccggatcgccgcgctcgagatactagggcacagcgaggagtgtctatgcaagctcgccgaaattttgggggagaaccaaccgtcgacagcatatcacttgaagaagctcctggaggtcggtttggtcactaagcgctccgaaggcggtagaacgttttacaggcttaccgagcgtggcgagcgcgtactaaaggtgattagggacttaaaagaccagctgcgacgtacgtgatacccggggcgaccagcccgaatatcacggcgatctgagccgcgcgacgcacgtcgtcgggtgtcgggagtcgatcccctccttttaggacgtacacgttcggtttctccagtcggactcccagcgcgcaggcccccacgtacatgggcaaccaggaactggggctcgggacgtcccgtgcagcccgcaacagtgaccggagtctcgcccggagtatccaccaaggtagggttaccgtgagtgccgcggcgcatacgggcagtgacagcacgttcagcaagtcgtccaacctcgccggaatcttaccgaacatctcgtactcgccccggtacccgaacatggcgtccgcgacgttcgtcgctcggtacatgaccgcacccggccacccgaggagatagtaccaccacaaggggcccacgacggagtccagtaggttctcgaagcaactttccaccgcagccgaagctacttccgctccgtttagacggcttacgtcccgactgacgagccacctcacggcctgtcgagccccgtctaagttcccctcccggagctcccgctctaccgggagcaagtgctcgacgagtccccgtacggaaatacacacccacaggaccagagcatctccaaccatcgggatgtagtggagcgggtaacacactcccagcaggaacccgcaaccgaccgccagggttaatccgccccagaccacgtcgaggacacgcccgcgccgtaccctcttctccacgagctccatcacccggccgcaccacgccaccgggtggaaacggttcggcggatcccccaggaccaggtccagagccaccgccagatacgcggcgagaaggggatccaacggcatcaccgccgtagggcgttgaggacgtcctcgggggtcggaatctcatcgaggcggtactccttccacccggcacgcaccgcggctagttcggcggggttcagtaacacccatcgcttgaacctggcggcctcgtcgacgggcactctaggacatccacagaacacgcattggcgtctgcggagcgacctcagcgcatcttccgtcaaatacctcaaccgccacgtcgggcggtccaagacccgtactacgtcgggtctcctctgacccaacgctgtgctctctacgatctcgaacccttcttctcggttgaattcacggattttagacagtctaacggccaggattctcctgatgacatcttccacgtcctcggagtccaagactcccttcgtagggtcgatttgcaccacgggccgattcgtcctgatcgcaacaccggcgggatggaagctcccggaacataccactatagtggggagagacgtatcgagagcggagaaattgcatccgagcaccaacccgggcgtggccacccggcgaccgtctcccgggcggattacgggctcgataccggattcccggaggatctctgacacgagctcgagatcggccacatactgcgccgtcgcgcagacgttcacacggtcgatccctaaattgtggagtacttcgacggcttcctcggccatccacggttccacgcgtttgcggccgtgtgtcggtaggaaatgcacggtagccccgagctcccgtatctgacgctcgacttcgggtatgggataatggccgatgtgaacgatgtggtccgtccggaccacggtaccgggggtaatgtcgcaggctccgaacacgcgaccggcgtcgagttccacctcgcagccacgggcttccagcacgtcggcgacctcgcgggcgatccgcttcagtccatccggggcctgaaccaagacacgtccttcaacgttgagggactcgactaccctcggcacttcgtcctcgtcataggattcggcggaggtgcatctcgtcatcgggagcaccaccggggggtaggatcgttgtacgctttgggtgtcgggatgaggcggagagtgcgacggcaggacctggtaaccgcggtacgatggggtctggaggaagccggcgaactcggtgagatcatcacgataacccgaaagcgggaccagccttccggaaaggcgctggttgaaataggtcgccggttcgggatccccgtacggttcgtcgagaagctcgccgaccacacaccgagcgactctcgagcgagggacctactaggagccccgggctccgtgtgtgagggtgtccttataactcacgggtacgagatcgtccggccgaaacggactttcgggaacaccgtgaccgcagctttggggtggaaaagatcccgaaagtagtctgcatagtcggagggcgtggagacgggttcacacgagtggcccgggtactttcggaagccatcaaacgctcgggacgcaccgtgggcgttctgatgcttccacagtccacaggtgggtccggacggaagtgggtcggtggatatcgatgggattgcgacgtggtagtggcgaccgtggatagggtttcggagtgtgattacgccctgatactcagcaggttcggggcgtgtacgaacgcccggaaggcggtgtacgatctgtctcatcaatccttcgtagggttcgaaccgcctgaaggatgggttggaatagattgcttcagagtcgcccgagataaaagggttcctgcagttcatgctctaatcctattaggggccatgtgtcgcatcgcgcgcctctgcgagttagaagacgtgaaaaaggcgctgctttcggaggagggacggctcggcgcggtatcctaccgggccgtacgagccggttgggaggaggcagggcgatgggggtgctgacgttggttaacgcccgaatccatgtggaccgtacgaccagcttcgacgcggaaaacggtaccaagagctacgtgattaaggtgaccgtagagttggagaccgacgactacgacgaggcgaagcagctcaccaagcgcctggaggagttcatcgacgagttgaaaagcgtcgttaaaagtgagctcttggaaaaagacctgggaaaacgagaactgatactgtagccgggggggatgaggaagaggcggaggaacatacggaagcgcaggaagaagaggaatacgaggagtcgtaccacgaagaatcgtacgagtacggagggtacgagtacgaggagcgtgaggtggaaggaatcggcggggccgcgagtaccgaagagggcgtgatactcaccgagcgcggggaggagttcttcggcagaacccatgagagcgcggaagaagccgaagccattcctcaggaggctacctgggtggaggaacccggagagtgggaggagtggagacccaggaggttcccgagagttccgctacctagggcgtacctcatcgtagccgccgtggctatcggtctgttagtggcggcgctactgtattacgcgaggtgatcacggacttcctcggcgataacgcgggcgagctccggcggcaccgactcccctacctggtcgtactgcgtctcgtacccgccctcgaacacgtggtcgtcggggtaactcatcagccgggcttgctccctaacggtaagcagtcggtcctcgaacgggtgtatgaacctggacccacccatcaccgtaggggctggcttgaatgggtgcaacctgagccagttcttgaagctccctctagccccccttatgacgctcagggcctccccccacctaaggcgacggatcctgcggagcttcctcttggacaacgggcgcagttcgtgattgggcacctccgaatccggactggggagatctccgatagcgtcccacacggttttcggccgttccacggtgggttcaggatctatcctcacgttggagatgaagacgcggcgccggtacgaagggaccccataatgtaccgcctgaagtacgttgaagtggatctcatcatacccggcacgtgcgaactctttcctcagtgctttttccaagggcccctccataatcgcggggacgttctccatgacgaaaacctcgggctgaaggtcaccgataatcctcacgaagtggagcaccaacctgccgacggggtcgtcgtagagtcgatccagcgggttaggtttccgctccgcgttggcggccgtgaacggctcgcagggtggcccgccgatgatcacgtccggctcgcctaactcgtccacgatttcctccgagtcgacccgctggatgtcgcgttcgatcacctcggcctctgggaaattctcccggtaggtcgcggccggcgcggggttgttttcaacacccccgaggatcttgaacccagcttccttgaaacccctggagaaaccgccggctccgcagaagagatccacaactttcggcttcaacggggcacccccagtcgagtttcactcaacacccgccggcggacgccccataaataaacggcagtggtcggactgctccgaccgtgcgaatcgcatagttatatcaatcgggggaagcggcgtgcggaaggtaccgatcgcaataggaatactggcggtcgtagtgatcgcggcagccgccggctactactacacgtcctcgaaccagctcacggtgttcgctgctgcgagcctgaagaagcccctaactaagctcgcgaagcagtacgaaaaggagaaaggcgtcaaggtagccctcaacttcggtccgtccggaggactgacggcacagatactacaaggacagaagtgtgacctgttcttctccgcggattggaagtacgtggtcaagctccagaaggccggtaaaacagcgaagaccaagaagttcctgaaggactacctcgttctggtggtatccaagacgggcgagaagaagggcatcaagagcgtcaaggacatcacgaagccaggcgtcacggtcgccgtggccgacccgaaggcaccggtcggtgagtacacccagcgcgcgctggagaagctcgggatctgggacaagatcgtgaagaacggtaacctgaaggccaggccgggtaccgtcaaccaggtcgctacgatggtgaagaatgaccagatcgacgccggtttcgtctaccggagcgtggcagtcggcttcggtctgccgatcgtgcagatgttcccgcactccctgacggggccgatcatctggggagccgccgtcatcaagggaggtaacgaacagctcgcggaggacttcctgaactactgtctcgagcacatcgacgagttcaagaagtacgggtggagtccggcatgatcgggaggtacgagatcctgagcaccctgttccctcctctattcttcatattcatagtgttcccgctggtagcgctggtcctgaacctaacgccccagggaatcgcggaggccttcagtgacccctacttctggtctgccacgttcaacacgatactctgcgccgtcgcagccgccgccgcgggtgtgataatcgcgatagggttcggttactatcatctgttcaagcgagactcggtgatctacagggtggcggacttcctcaacgacctgcccatcgccctgccgcacaccgtggccggactcgcgctactgctggcgttcggtcgcaactacttcggatggctgggggagaacgggctcgcgttcaccctgatcgccgtagtcctcgccatgctcttcgtgtcgtacccgctagcggccagggccgtacaggcgggtgtcgaggagctaggacgtgagctcgtggacgtcgcccgtacgctcggtgacgaaccgcccaaagcctacgtacgggtggtcgtgccggccctgcaggaggcactgcttggcggcttcctcctggggttctcccgatccctgagcgagttcgccgcggtgatcatgttcggaggtaaccttcccggtaggacccaggtactcgcatcatacgtgttcacccgggcggagtccggagatctagaggtcgccgtcgccgccagcgtgttctgcatggtcctgtcgctgaccatggtcgcgttagtgcgctcggtgaccgggggacttcgccgtgctgagggttgagggagtcaagttctcctacggagaccgggaagtcctacgcggcgtcgacctggaagtggagcccggtgaagtacgggtgctcttcggtcccaacgggagcggtaagtccacgctcctcaagatcgtcgccggtatcctgaggcccgacgagggtcgcgtgatcatcggagaggaggacgtcactgacctcccacccgaggagcgccacgtggggtacgtcccacaacagcccgcgctgttcccccacatgaccgtcgaggataacatcacgtactccctccagaacggtcgcggcgatcccgaccgactggatgagcttgtggagctcctcggactaaaagaacacctcgatcggaagcccgacgagctcagcggcgggtaccagagccgagtatcgctcgcccgagccttattctccgacccgaaagtgatgctcctggacgagcccctcagcgacgtcgacctggccgtgaaggcgggtctcgttccgaggttccgcgaggtactgaaggagacgggcatacccgccttatacgtcacgcacgacccatgggaagccgagcgtatcggtgactccttcaccgttttaatcggtgggaaggcggtggacgtgaactccgtagatgaggcactggaggagctgaaacggggtgtggaaagtgtcaaagcgtaagtacaggggcttcgtgtatacggacgacttggccaagcccgaagagttcatccggttcctacgccgcttcctctcgcctccggagcccgagaccgtggaagtagggcccgaactctcgggacgtgtactcgcggaagacgtccgtgcggagcgcccctctccacccttcacccgctccgctatggacggatacgccgtgagatccgaggacgccgagcccggggccaggttgaaggtcgtaggcgagtcgaggataggagaaggtaccgacgtcaaagtcggtccgggagaggccgtgtacgtcgacaccggggctcccgttccggagggtgcggacgccgtcatccccgtggagttcgtggaacgcgacggtgacgagataatcgtggaagaaggcgtcgacccgggggataacctggacccggccggctgctacgtcgaagagggagaagttctctaccgatccggacacctcgtcgagcccgtggacgtgggcgtgatgctcgaacacggcgtggaggaggtggatgtccacaggcccctgcgggtctcgatcgtggtaactgggaacgagctcgtccaccgtccatcggagctggaaagtgaaacacaggtggtagactgcatcggtcccgtgctcaccgcggagctggagaacatgggctgcgtcgaggtagtgggaacgagcttagtcaaggatgatccgggagagatccgtgagaccgtggaggattacgccgatcgctccgatgtggttctgatcacgggcggatcctcggtgggggagagggaccacgtcaaggacatcctggacgacacgttcgacgccttcatccacgggatcagggcccgacccggacgtccgttcggtatcgccgcgcgggagggaacagtcgccttcaccctgcccgggtggcccacgtcgtgttattctaccttccgggtttgggtggtaccttcgctactcgtgctggccggagcggacccgttggtggtcggattcgagaccgaagccaccgggataaagtccaagcgcgaggtcggcgtgatagcacgcgttcgtttgacctccgacggcgccgaaggattgtctcgggaccgttccagtcacttcgcgctgtttcgggagaccgacggcttcgccctagttcctcctggaggctcggagcgtgctctgattctcccgctgcgcgggttcctcaacttgttcgatgaggtagaacgcaagttctgaaggtgtccaccggccgtccacccgtccccgccgaccccacttatttaactccgaggtgtcggagcgggtgcgaagaccggtgggggtcgcgggttggtaaagatagtcattcacgaggaacgttgtcacggatgcggtaactgcgtgatcgcttgcccggtcaacgcttgtaattcccctaacgtatggggcggaaagggtcccgaagacggtgaagatgtagtgatcaaggtcgtgaacgggacggtctcggtgattaacgaggacctgtgcgaagcgtgcatgacctgcgaactcgcctgccccgtggacgctatcgagatcaaaacgtaggggagccacgaaagatggccgaattcaccctgctcacgggtcgaacgatctggcagggtgaagctatcgaaaccgacaaggcgggcgagatctaccccaacgccaccgccatctgttacttcaatcctaaggacatgagtgagctcggcatcagcgagggtgaccccgttaaggtcaagtccaaatacggcgaagtaatcgtacgggctaaagccgcggacaccgacgtgccacctcgcggtatagttttcattccgatgggcccctgggccaataaagtcgtggatccgaacaccaagagtacgggaatgcccggcttcaaggggataaaggtcgagatagaacctactgacgaagagccgatcgaagacatgtctgaattcatgcgctccgagtatctctccgaataacctcatggtagcttggtggttcacgtttacccatcattttcatcgaatatcgacatcgctaacaacgggaagggggtgaaaaagtggcgaggaaagtgatcaaggatgtggtctgtccgttctgtggtacgctgtgtgatgatctagaggtggtcgtggaggacggtgagatcgtggaggtacggcatgcttgtaggatcggtgctgcgaagttcttgacggcgcaggaggatcatcgtcacaccgagccgatgatcaaagagaacggagaatggaagaaaatcgactacgaagacgccgcagaagagaccgcgaagatgctggtagaagctaaactacccgtactctacggttggtcggcgacgctcgtagaggcgcaagagaagggtgttgaactggccgagctcgtcggtggaatcatcgacaacacggcttcggtgtgacacggaccttcggtactgggactgcaggacgtcggtgtacccagctgcacgctaggtgaggtgaagaacagggcggacacggtgatctactggggcagtaacccgatgcacgctcacccgcggcacatgagccgttacaccgccttcacccgcggcttcttccgaccgaagggtcgtgaggatcgtactatcatcgtcgtggacccgcggaagaccgcgacggcgcgtctagccgacgtgtacatccgcgtccgccctaacgaggactatgagctgatcagcgcgctccgggcggctgttcacgggatcgagatcgagcgcgaggaggtcgccggagtgccgacggagcagatctacgaggtcgctgacctgatcaaggaggccagcttcggcacactgttctgggcgatgggtctaacgatgtcccggggtcgtcatcggaacatcgacaacgcgatctgtctgatcaaggacctgaacgagtacacgaagtggacgctgatcatgatgcgaggccactacaacgtgaccgggttcaacgaggtactggcgtggacgaccggatacccgtacgccgtggacttcagccgtgggtacccgcggtacaacccgggtgagacgagcaccgtggacctactaacccgcggcgaggtcgacgccatgatggtcattgccagtgatccgggtgcgcacttcccgcggaaggctgtggagcacatggctaggatcccgctcgtgtgcgtggacccgcactggacgccgaccgccgaactcgctgacctgtacgtgcccgtaaccatcgccggcatcgaatgggaaggcaccgcctaccgaatggactcagtacccatcaggatgcgcaaggtcgtcgaaccacccgaaagcatgctcaacgacgtagaattcctcgaaatggtcatagaaaaggtcgaggagatgtaagcccgggccgccccacggggcgaaccccgtccccggggagccccgtggggtgaagcgggggcaagtcccccgcggcccgggcctttcactccgtaactccctccggggtgcgtccatatggaactccgatgcccgtactgcggctcgcgctcctgtgtgaacgaatccgccctgtcgttgttcctccgggcgtccgaacgcgccgcgaggtacgtggtcaaggggcgagatgacgtggacgaagatccgaacttccgtccctcgttcggtgaagtcgggatctgtaaggagacttccaagcgcatatgggtgtgtccatactgtcactccctcatcccggagctcgaacccgatgggatgaccgcccgatgtcccgaatgcgggcgggaagctaacgtggcaccctcccgccgtaagatcgtgtgttgaaaggagcacagctccgggtgtcggatgggggggttcgtttggccaaagaacttctgatcaagaacgcctgcgtgtacgaccccctcaacgggatcgaaggcgaggttatggacatcggggtgaaggacggtaagatcgtcgacccttccgaagtcgacgagtccaaggcgaaggttatcgacgcggaaggtcgcctgacaatggccggaggtgtcgacatccacgcgcacgtggccggtccgaaggtcaacgtgggtcgtatattcagacccgaggacagccgccgcctccaggtggcgatcaagaagctcggaacgcgttcgggtactggattttcggtcccgtcgaccacgatcacggggtacctgtacgcccagatgggatacaccaccgtgatggaagccgccaccccgccgctgctgaccagacacacccacgaggagatcagggacactccgatcctggacgaaggcgcgtacacgctgatggccaacaactggatcctgtacgagtacatcaaggaaggcgaactcgaaaaggcggccgcgtacgccgcctggttgctccgagcgaccaagggttttgtgataaagatggtgaaccccggcggtaccgaggcctggggatggggtgagaacgtccacagtctggacgatcccgtaccctacttcgagatcaccccggccgagatctaccagaactacgtcaagatcaacgagatgctgggtctaccacactcgattcacatccacccgaacctcctcggtgagcccggtaactacgagatcacgacggacagctgggacgtgatcaagaagacgggtgtggagccgaaccccgagataggtgaacgtgagcaggtcgtgcacaacacgcacgtacagttccactcgtacggcggtgactcttggccgacgttcgagtcgaaggccgaggaggtcgcgaaatacctgaacaagaacgaccacgtgacggtcgacctgggtgcggtcaccctggacgagaccacgaccatgaccgccgacggtccgctcgagtgggagctgcaggagctgacgggcttcaagtgggcgaactacgacgtcgagcttgagacgggatcgggcgtggtaccgttcatctacagtccgaagaaccccgtgcactcggttcagtgggctatcggtctggagatcgcgcttctaaccgagaatccatggcaggtcgtgatctcgacggaccacccgaacgcgggcccgttcatccggtacccgaggatcatcgcgtggctgatgagcgaaccgtaccgtgaggagtggatcgaaaacgtacacccgtgggtgggccagcgcgcggcgatcgcgaccatcgaccgcgaatacacatggaccgacatcacgatcacgactcgggccgccccggcgaagatgttgggtctctcggaccgtatcggacacctgggtgagggcgcttacgcgcacatcgccatctacgacatcaaacccgacgaggtggatccctcgcgggactacgaggaagtggagaaggccatggagcaggcgtggctcgtagtgaaggacggagagatcgtagttcaggaaggtgtagtggtgaacgaacccgtcgggcgtacttactgggtcgacgttaaggttccggaggatctgctcgaggaagtcaagaaggaccttgagacgaagttccggcgctactactccgtgaacctgggcaactaccaggtccaggacgtgtacatcccgaaggaggagcgaatcgtaatcgacgcccgcgatcgcctctcgtaaacgttctttcctcggggggtacctcggttgaaagaggtcgtgttgacgccgaaaggagaaccggacgtaccgctcgaggccgaagttatatgcccggacgagttcgcgggtaagtccgagggcgagatcgaggcgctgaaaatctacgaaggtaactcgaccgtcgagctcggcgagtacttcgacgtggaaggggatgcgggcgactcgcccggggacaccaggatcgtgatcgaaggggacgtaccctgggtcaagctaatcgggtacaggatgagcgccggtgagattctggttaagggagatgtcggccgacatgcgggcgccgagatgaaaggaggcaagctgatcgtggagggggacgccgacgactggctcggtcgggagatgaagggtggagagatcacggtgcacggaaacgccgggaactacgtgggttccacgtatcgaggtgagtggcgcgggatgagcggtggccgtatcctggtgaaaggggacgccggcgacgagatcggagagtggatgtccgacgggaagatcatagtggagggagacgcgggcatcatgataggaattcacatgcagggaggcaccatcatcgtgagaggagacgtcggagtgcgtcccggcgcccagatggagggaggaaccgtcgtcgtctgcggccgcgccgaggacattctgcccagcttccgatacgagggactcaaggaggaccccgtggaagaagcgaccgggaccttccacctgttcacgggcgactacgccaacgggcccaaggtcgagggcgaactgtacttgagcacggcgctcaacgaggtgccgaggtaagctcctgctccctccaaacgaccggttcgttatctttcccttaacgaatccctctcggggaccgccgacgtgaagacactccggatgtcccccgaagagctactggagtactttcggaaagaggtcgaggagggagatcgattagagcttaactacgcgttcgtacacatacccggcgaggtcgttaaaatcacgaggtaccgcctccatctgtacgtcgagtctgaggtagcccccgggattcgacgctacgatctggaggagatatgctcgatgatgctggaagtaatccacgagcccaaggaagggaaaccggttaagatcgtcgtcgagggggccgacgagagtccgggcataggtatcctctaattatgttgactacttctcaacacctgaggtatcaaagtcaaaattaaaagacatcaactccggctcggttgagggctatccccggttgacgaggacggcttacgtgctgctagccctgctggcggcgctggtcggacaggcatcggcggcatcggtaggttcgcagctgaccctcgacacggcgatgcagtgggaccaacagcagaacaagtacgtggattccgacgtggccgccagggacggttactactaccaggtcaaagggccggccgtggcggtggacagcacgggtacggtactggtagcctgggaggaatggtccgagaacggcaacgtagtcggtaagataggactgagaacaccatctggtaacgcagtctacgtgaccccggagcaggattgcgtctacttcgccccggccctgacgagctacgatcagggtaagttcctcctggccgtgacggaagtgccgcagagcaacttggtcgcgcaggattacggcaagctgctagtgtacaaggtcgacgtctccaacggccagattacggtgggttcctcaccggtacaggtagccgataacgccgcctacccgcacgtggtgtacctggggtcggacaacgacaacaggtacgtggcgatcgtgtacgagcggtggaacggagagactggcgacgtcgaactgcaggtgctcaagatcgacacgaacgggaacatcatcccggtcttgagtcagccgcttgttatcgcggaaggggtgtgtaaggactacgttaagggcgacgttcactacttcgggcacgccagacccgtggcgtcgctgtaccaagagggtgactccaagtacttgatagtggtgctgacgaactactcgcaagctactcccaacgtgagcgagtggggtttctacggcgagtggaaggggtgcaaggtggaggcgtacgtggtggatctccccgatttctcaacgatcggtgggttaagctcggagaacgtgcacaaggtacaaggatcactgtcggcttccgaggacaccaacgagtgcccgtgggtatgcgacaacgtggtagtgtatcgggtcggatcgctctggggagggatgtcgggggacaccacgatcccggacatcaacgccgcactgatagtgaagtcgagagactcctggacgttctcgtcggacaccacgatctaccgccgtatctacacgcagacgggtcccgccgtagccagggtctacacgaacaatgacgataagacgccgtactacttggcggtgttcgcggataacagcgggggtttcggtaaggagcggttaacgggcgtcctgttccgcgtcaaggacgggaagatccaggtgatcgcgcagtacgacctcacggggttcggtagtgggtactattactactgtccgaccgtagccacggtcaagagcaagtacggagatgccgagctggttgtggcctgctacaagggtgacagcgggagcggcggccataacatcggcgacgccgtcatgctgacggtaagcatcggtgatcccgtcgatgagttcatgtcgtcggccgccgagctgctcaacagcctgactggtaccgtggacgtcgtgaacaacgcgatcttcaacagctactcggggctcaagaagaaggtttccgacctggagaagaagtcgaacgagctaacgcagaccactcaggagctgcagaacaaggtctccacactcgaacagggtcaggaggagctgaagcaggaagtaagcaagatctcacaggaggtgagtggcctgaagggcagcatagacgagtgcaagaacaccgtagaaaacctcgaagagcgcgtgaagaagctcgagcgtaggaagatcgcggtatcaccgatggcggtactggccgccgcgttgacgctggcggcgtacaggaggtacggccggcaataggacgggtacgcccctcttggacttctcttgtcttttgttcccctctgtttctgttcctccggacacggtctcacgctcggtcttggatactgattcgttcccgttcggtttcgttatttttccgtaaaacagctccgggttcaggtaggcctcgagcgcccgcatcgcgtaggccgtggcccatatcgacgccggttcgtagtgggccccttcggtcgtggacgtcacatcccgagccggccacggccaggctccgtaccactccgggtgttcggtcccacggtaccgctgggatacgagccactcgacggtggcgtggaggttgtactccgggtccgtcacgagatccgagagcttgcgcttaccgcctggcgtctcgatctccacgtccgtcgcgacatcgaaccacagcgccttcagcagcacgaggctcaggacgttccccgtgacggtcgtctccggcgatccctgcgcttctagataagccgacgagtacgcccaggcggggccccgaccgtgacttccttccacccacgttactccggcttcctcaccgttgaagagccactcgatgcccctgcggatggcgttcaggatccgatcgcggtccacgtggagcccgagccggtccgccttcaagtagacgtctatcagagtcgacaggatgtatgcctgagtgtccgccgagtactcttggcacatcagcccggagtaccaagatccgtccgggttctgacgctccagcagccaggagactccccgctcgatggcgcttttgatccgatccaccgcactgtcgtcgaggttcagcaggtcacggcgttccaacgccatcaacaacgccgcgaccgccgcacgggtgtgccacggagctccttcccgggcttcctccctcttcctactccagccaccgtcctccagctgttggtccaggagccaggtcagtcccctgcgtacggcgctcacgagctccccgtattccccacccgactcgtgtcgccgctcgatctcgtggatcagcagcatgatcgcaaccgcggtgtcgctggttaaactgcccgagtgggttatgcccctgtacgtccacgcctgtccccagccgccgtcctcgttctggttgtcgagtacccacctgacggcctcctcggaagccttagaccactccgacgtcggcgtcatcgccggcacaccggcgggcaccctatcggctagtaatccagcgcgctccgcgctttccagcgtgggatacaccagcgagatcgccttcagctcgtatccgaacgtcagctgagggttccacaagtgagccgaagccaagtagggaccgccgcgatccgtggtgatgaaccaccatacggtgcccgctttcacggcgtccgcgcactccgtctggagctccttatacggctccgtattcttccagtccagcgccgtcgtcggtgcggcggttatcagaacggctatcgtggcgactaggacgcgcacgcgctcgctcccccaaacctttaatctcgatgaaccggaccgtaacgaacctacaacgtacggtagatgaagaaaataaaagttgagtccgtatcggcgcgatgggggccgacacctccgtggcaccggtcttgatcctcgtcatggtgttcctagcggtctcggtccccgcgcactcgctggacattgtgatattcgggaacgccgcgaagggatcacccgaggagatccgtgctgtggaggagcgtgtgaaggaagacctgggtgtggacgttcgaattcacgtgcacaacgtgctcgtcagctggtccgatcagagcgctccggtggacttcgactcgctggcccacgacatcgaacgctccgagatcgtcgccctagacaacatgggacccatgccgacaccgtttgcgatggagttatcggagcgcgtcttgggtaaacccgcctcctcgatgcaggagttcctcagagagctcgcggagaggaagcggatagtggcctacgtgacaggcgaccagcacgatttcgtgatcttagggtccggctgccggcgtatagtcgacggtaccgccgcggtcgttaacttgggcttcctgttccggttttcctcggatctgacaccggtcatagagttcctggtgtggctcgcggatccgtcggtaccggcggagagactacacctctccgacgtacggatatcgtccgctgccgtctacgtgccgggccgaggttgggagttccccgaagtatctggagaagctctcgagatgtcgtaccaccggtggcttcacgcgctagagggtcgggatcgcaccaccgaaccactctggacgaaggtccgcctgagctcgataccatcgtgggtgaaagccatccgggaagcatcctcgcagttcttccggtccctgtggctcccgaaccgacgcgtcgtggtggtgctggactacatcgacgcactatacaagggtgagagggatctcgtggagaagctcaccgataccgtgtatcgggaggtctcccgggagttccaggacgtgacggcgatagccgttctgtgcgacgggaacatggtctcgccgatcgaggcgctgctcgggttgaaagacgccggatacgacatcgcggccgtggtctccctgtgggccttcacgctcgattaccccaaacccggtacttgggcactcgaaggaatcgacgccccgatcatcaaggcagtttacccgttctgggccaattggatggacgaaccacagcgctacttgaacatgaacgagggggacccggagtccggtcgcgtgggcgcgctcttcgagtggggttaccaggtgatcggcgggcccgaacccgagggtgccttctggttcaagatgatcgcgctcaaggagcgcgaccaaatgatggtgttcccgctggaggacatgatcgaggacgtggcccggatggtggcggggttcctgaggctgcggtacttgcccgagtcggagaaacgggtagcgttcgtgctgtactgttacccgccgggacgcggtgagatcggcgcctcttacctggacgtgttccggtccctggtgaggatattcgaggcgttggcggaacggggctacgatcttggccccgcgacctccctgtaccggaagttggcggagctccgacgggaagacccgaaagccgctgaagagatggagaaacgtctcgcgcacgctttgatggcggcgtccgatctcgtactgaagaacgtgggtccgtgggctaagggtgagctagccgggatggtgcggctgtaccgaggcgggcgggccgaggtgagcgtcgactggaacgggaagtcgatgaaggtgatcgtggaccacggtgtgctccggtggatcgacgtggacggctcgtcgtacgtgctcgggaccgtgagcgaggatcaactagtcccggtggaggcgctggaacgctggtaccgggaggatgtggtgcggaggttcgagtattacctctcgctgctgaccggtgacgatccggagaccgagcgggctcggaagtccctgatggagtggatgcgggcgatcgaggagaagttcggaccgcccacggacaaccgcgggatcatgaggtacggcctgtattatgtcatcccggccctgcgactgggcaacgtggtcgtgatgcttcagccggtacgtggttggtccggaagccccgagctggtctaccactccccggacctacccccgcaatggcagtacgtcgccgcgtacgaatggttgcgcagggtcttccgggcggacgccgtggtccacgtgggtacgcacggaaccctcgagtggctgccgggtcatcaggtcggtcttctgggcgtggactggccgcacgtgctgctgcccgacgtgccccatgtgtacctttacatcgtcagcaacccgggcgaagcgatggtcgccaagtaccgctccggtccgatcctcctcacgcacttgtcgccgccgtggggctacttcaaggacctgggtaagtacggggagctggagcgtgagctcacgaggtacttccagatgaagagcttcggaggagaccctcacgtgctggaggagctgaggcggcggatcgtcgagacggcggagcgtctgggactgctgaaggacgtcgtcaacatgatattcgcggagcggaaggaaccgccgcccgagaacccgaaggagtgggcgatggatcatatcgaggagttcatagacaagctccacgatttcctactggacctcgcgttgaggaacgtcgcgtacggcctgcacgtatacggtgaggacgtagacgaggacgtggccgtagagcaggccgcggcgctcgcgtcctcccgtgtcgccccggtgttcgcgtactacgccgggctgatcgactcaccggaccaggaggcgctgaaccggctgcagtccgatagacccgacatattcgcgtggttcaagcgcgaactccgggagtgtctgagggatatcctgcggaccgttctaaagtaccccgatttaacctctcagctggaacgttacgtggaactgaaagatcgggaagaatactacggcgaaccacccgacggcgtcgaaggtccgggaagggaggcgaaacgcctgttctggcaggtatccgataggctcacgatcttggcgcaggaggccatcctgaggtatttccacggccggcggaatgaccctgaccacgagcacctcctcgccgaggccgtggccgacctgtacaggatctacgtacactaccgcgactcgggccggaccgagctggaggaactgctcgccgccctcgacggcaggttcgtcccgccgggactactgggcgagccgatgtggaacacgaaggtcctacccaccggacgggacggctacccgatagacccctcccaaatgcccacgccggaggcgtgggacgtcgcacgcaagctagtcgatcagatgctcgcggactactacctaagacacggtaggtggccggaggccgtgggcgtggtcctatggggtattcacgaactctgcaccggcggtctaggcatcgcggaggtcctgtacctgctgggcgtgagacccgtgtggaacccggacaccgggcaggtcaccggggtcgagctgatcccgctggacgagctgaaggtgaaggtcggtaaccggtggatcaaccgaccgaggatcgacgtggtggtgtgggccgccctgcacatggaggacccgctgaagctactgactgaggcttactatctggtctcccatgtggacgaacccaccgacgtgaactaccgtcggaagcattatctggagctgaagccgcggttagtgaaggaacttgagaagagcgggatgtcacccgaagatgccgagaaagaggccgacgtgatcgcgtcctcggggttcttcgcgcaaccacccggggtctacgcgggtaccggggcttgcgacatcgtggagcacgcctggaccgacgtctcgggcacggtcgggctcttcgaggaccccgagacggcgctgaagaacttcgagcagagattttgggagaagttcaggatcacctgtgagagccggatggcgtacgtctacacggccgaggcccggatcctgacgatccgagaggggaacaaggtcagggtcgtcgtgctgaggacgagcacggaccgcgtctaccacgcgatcccgtcggtcgaggcgttccggtacctgatgtccaaggtcgacgtcgtggttcacagcgtcgtgaacacgtggggattgatcgacacggacgacttctacgactgggtcggtgggatggcactgtatgcgacgcacgccgcgggccacgcgccggaagtgtacatcgggaacgccgtcgatccgaccgccgcaaggacgttgacgggttaccagcagctggtgggtgaggtctacacgaagctactcagcgagtcctggtggaaggccatgctggagcacggtgactacggctggtcccggatcgtcaggaggatcgagttcctggccgggtgggggatcacggtcccgtcactgcgtccctacctgaactccgtgtacaccgaggtgttcaaggctgtggtacagtggatcagccaggcgcctccccgcaccgagtacgggtgggcggccgtggtgagcacgatcgcgtggttcgtggagctcgctcggacgggtgtgtggaagccggactcgaagacgctggcacaggccgcgaaggtcctactggagacgatggccaaacacgggcccgcgacgtgtcaccacaccagtcccaacccggcgttagtggtgtacgccgctcgggtcctcctggaggccggttactcctactccgaggtcaagcggctcctgtccaaggtgatgaagtggtacgccaagctggacaacccggagatcgtccgggagatcgagaggttaacgaacctggtgatgaccagggcggcgagtgagaggtcggccagggccgccacggcgtcccgttcggcggcgacctcgtcatcggcgtacaccggcgttactgtctcccggacggtttcgtcgttcaccggaccgggactgcccggagggaggggaagtgctcaggtcgtagtggggttgttgggatcggtgttacggggtgttgcacgcggaacggtgctcccggagatcggatactggacgggtccctcgagatacaccggtcacgcgaaggcaggttcgagggtcgggaagaccgagcgcagtaccgaacgcgagtcgaaggcgacgcagacgttcaccaggacctccccgccctcctcggcccctaagatgatctgggaatgggtcgccgccctgctcctgacactactgttcctcctggtgtggaggatccgaccgacgggtcccagaccgcgggctacgtgggttacgccagcaaccgttccgccagtcgccgcgtgacctcgcggacctcggactccggtaccacgacgctcaccgctacgaccccatgtgcgctacctagcaggtcgaacccctcgcaggctgccaagaacgtggacacgtcccgggccgacatcccttcgcccaccaccgtgaccaagcccacgtccttgtcgacctcccagtcgtagtccaggccgttcagggcttcctccgcgctcctcagggcggtctcctctaccaggaggttgatgtaaggctccgagaccgtcgtgaacaccgcgaggaggttcacgccggcgttccccagcgcggaggtcaccctacccaccactccgggctcgtccaccattttggcaccgctcaccctaatcagcgcgacgtcgtcccgggacgccactaccttagggccgggctccgtactgtcggatatcacggtccctatttccccggtgaacgagttcccgatcaggactgtcactccgaggttcttagcggcctccacggccttagggtggatcacccccgcccccgatgcaccggccatcatagcttcctcgtacgacagccgctcgacgacctccgcgtccgccagttccgggtcggtggtcatgatgccgtcgacgtccgtccatattactgaccgcgaacccaacaccccggccaggacggtggccgtgtagtcggagccccctcgtcccagcgtggtcacgtggccgcggtctgacctcccgatgaaccccgtgacgaccggaacgcgacccgagcggaggtctcgtaggagtctcgagcgcgttccgtcccatccgacgatgtcggcgtttccggggtcgtcggtggtgaccagtcccacgtcccaggcgtcgtacgccatcgccttgataccccgctccttcaggtacgccgccacgatgcgggcggacgcgcgctctccgagggacagaaccaagtcgcggaggcgctcttcgggtctgccaagttgctcgagaaccgtggcgacaccgtggaggagtgtctccatgtctttcaggaacgattctacctcctcgtgccgctgttccagatgttccgtgatgaactccctgtgacgctctagtatgggggtcgggtcggcggaaccttcggcggcgcgtcgaacgaagtcctccagtgcatctgtgacgccggctagggccgagaccacgatcacgtggccggaagccgcggaagcttcgagggtccgaagtccctcctcagaggctaccgacgtgcctccgaacttgtgaacctccaagctcggtcccctcttcgttatgggattcgtaacgattctgggtttggcgccggggccgggatttgaacccgggcggcccatacgggccacgggatctccaatcccgcgccttggaccgggctcggccgccccggcgcatccagacggcacaaaaccgttgcctgaataaagtttacgggatggtctgggcccgaaccttaagccccttgtggagggcctcctccaaccgttgtccgaccgacgtgtccttgttcaccctgacttcaccgctggaacccaccgtggccgtgaacacgtactcgtctcccacgaacaccttcacaggacgtcctgagaacttgtcccccagctgcagcctgatgtattcgccgtcgtcgacgacgcgcatggggaaccgctctccggactccacctcgattacttcgccctccccttcgggaaccggagaaccagccggctgcggtcgttcacctcgccgctcctccagcggcttaacggttatcttcagccccgtgcggtgctcgatctgttcgacgttcctacccttcttgcctatcaccataggaaccatatgctcggggacgtagaccgtggcctgtgaccccttcacctcgacgtccaccggggcgcggccgcctatgaagcggcgaacttctcgttccacgacttcggccgcgagtcgttccgatgccgtctcctgctcctcctctcccttgacgggaacgacgaagacctcctctccgtaggtgtagatctcgtactcgagctctccggtctcgaagtcccggatctccacgacaggacgcgctaggtcctcttccgtcatcccggtggggaccttcacggtcagcgacacgtcgtacaccttcttgatctcaccgtcctcgatgaagatgaccgtgtccacgacctgcggaataacacccaactccaccctgccgatgagccgctggatcgcgtcgatgggacgggtagcgtggactactccgatcatcccgacgccggcgagcctcatgtccgcgaagacctcgaagtccttcgtcttccggacctcgtcgtagatggtgtagtccggacgcaccaggaggagtatgtccgcagtcttctccatgtcgccgtccaggggcgcgtactgggtgatctcgtcaccgacctgcaggtcacgcgggctttccatggtcttgacgatcttgccctgttcggcgtaaaactcggcaagcgccgcgcagaacgtcgacttaccggaccccggtggaccggccaccaagataccttcagcacgctccctcaggcgctccttcagcttctcggacaggtcgtagtcgtcgaggctcaccttgacgaccggccggaccgcggtgatctcccatccttccgagaacgggggtcgggctatcgagatccggaggttacgtagctgtaccacggtcgccccacctcgatcgatctccacgaagctcttctcgtccgtgtacgccttctcgatcacctctctagcccatttttccagctcctcacgagtacacggctccggacggagctctatcagcttccactctccgggtcgtcccaccttcgccttcgggggcacgttctccttcaggtggagtgacatcgcgttctcgggcatcatccgctcgatctcggtctcacccacacgggtgatgggctcgaagtacaccacctcgagcccttcggctttggctacctcagcttggaccttgtcgctggtgatgagcgtcgcgttgtactccctcgccacctcacggatcatggcgtcgatctcaccgctccgtgcgagcctgatctcctcgagacccggccgttcgcccgcgaactcgatctcgattatcccttcctctgcgagtcgctggagctcctgcagttcctgaagtccggcgaatcccgtctccctaccgcggttggcctggtactccagttccgagagaacagcacgtggaataaccacgatcttgccctcgaggtaaccttcctcggcgagacgggagatcctgccgtcgatcactacgctggtgtccggcacgacgtactccgtctcgatctctacatccatggatcccacaccttccccacgtgtcgcgttcaccgacttcgtcctctcgtggcctgtatcagtatattaacggtacacctcgtccgggttgaaaactcgatccatcacgacctcgaacgatccgtcccgagtaacgcgtcggtagaaacaggacctgtaaccggtgtggcaggccccaccttcctgctctaccacgtacaggacggcgtctttgtcacagtccacgcggacctcgacgacccgttgcacgtgacccgactcctcccctttcttccatacctcgcgccgactcgtgctccagtagtgggcgtaacccgtcgtgagcgtccggtataccgcctcctcgttcgcgaacgccgtcatcaacacatcaccgttctcggcgtcctgggcgatcgcgatcaccaacggctccccgccgatctcgaaccggtagttgagggaggacgtgaccttccgcgcggtctcgggatccagtggtacgtgactcatacttcagccgccctctcgagttgatccagcgggacttcctcctgaaccccggttttcaggttcttcaccgacacgtatccctccttcagctcccgctcccctacgatcacggcgtagtcgtactcgagcgagtccgccagtgagagcgccttgcgtatgtgctttcctgaaacctctacgttcaccacccacccgagcttgcgcagcttcgcggctatctcccagatcttacccgacctcacgagcggtatcagcaaggcacgggtttcctccacgccgtccgggatccggtcgtacagctcggccgcgaggaggagcctgtcgaaacctatggccatgccgacggccgggacgtcgggtcctccgagctccttcaccaggtcgtcgtagcggccgccaccggcgcactgggatcctccaccgagctccggcacgtgtatttcgaacaccatcccggtgtagtaatccaaccctctcgcgacggagaaatcgagttcgtggtcgacccccgcttcccggagcgcgtccgagatttccatgaggttctccagggcccgctcggcgcgttctttcccactcacggcctcctccacctcggactccgagcgcgccgtcaccaccgctagggccttctcggccggctcggccggtagcaacgtcttcacttcatccagttcgcccttgtcgacgaggtgtgctaccttgttctgtacatcttcacctattccgtactcttcgagcaatccccggagtattcccagatgtcccacccggacttcgaaggcaccggaaggcaagatgccgtcgaagatccggtaggtcagctcgatcacctcgacgtccgcctccgggcggtccgagccgaacacctccacgccggcctgccagaactcacgccaacgtccccgctgcggctgctcgtaccggaagcagttcacgatgtacgccagcttgagagggtgaggtcgcgtcttcagctccgcgttgtaaaaccggacgacaggcgccgtcatctccggcctgagcgcaagcttcctccccttcttgtccttgaacacgtacatttcttccagtatctcctcaccggacttctcctcgaacagcttcgcatgctcgaaggtgggagtgaggacctcctcgtacccgtaagagcggaacacgtccaacaggtaccgctccagccatctgcgtgccctcatctcctccggggtgaagtcgcgggtgcccttgggtcgctccaccttcatcagcgtaacccccatcagccggtccgtcccatgagtgctatgaagaatccacaggtctcatgtcggtgcgggaacagtcggcacgcctcgggcatgtcgaacccctggtcaccgaccttgacttccagcagctcgaactcggggtgctcatccaagaaccttcggactacctcctcatcctcctcggggaacatcgagcacgtggagtacagcagacgacctcccggtttgaccatttcggcacccgctttcaggagctcgtactggaacttgggcagtcgttccagttcatccggggtgatcctccaccggcgctcgggattcttcggaatcgtaccgtcggcggagcacggtggatcgactaacacggcgtcggcaaactcacgacccagcttctcgggcgcttcgcgtccgtccatcaggtgtgtttcaatgcagtcgaggacgcccatacgttccgcgatctcccggagacgttccatccgaacctcgtccacgtcgatcgccacaatcttgccctctcctcccatcagctgcgccatgtgggtggtcttaccgcccggagccgcacaaaggtcgacgaccacctccccgggtttcgggttgagaactgcggatgcgagcgccgcggcctcgtcctggatcacgaagaggccctcttcccactccggcatctctccgatgggaagtccctcgggaatcttcagtatttcgtccaagaagcgtcccggctcgaccgtgacccggtacttcctctgtaaccgctccgccagctcttcagggtccaccttgagggtgttcacgcggatggtcagcggcggccttcggttgttggcttccagtaaggcgaccacctcgtcagggtcgccgaacatctccatccatcgctcgatcagccaccgcggatggtagtactcccacttcaacctgtcgagttcgtcctccggctcgggaggttcgtagtccttcaaatccagtgtgaacgccttcacgatcgccgccgccccgggattggctagcctccggaccagcccgtgtagcacgtcggctacctcgtcggggtcgccgtcttcgaacacgacctcgttcacggcgatccgtgccgcgttcctgacccacgtgtcgagctcggtcacgtcatccgtgatctccaggacgtcctctattacctcgtccaagagtccgcgtttctgtagcacactgtacagcagcccggcggacacggacctggcttctcgagaggggttcatctccttcatcaccagacgtctggcgtactgcgtgggtttgatcctctccgctttcaccagcgtacggagcactatctccacggcttcctcgtaggtcttagcgtcccgagacgtcaccgcgcatccgccccatcaccgacgtcccttgatgtacttcgaacgtatcgtcccgagttcgaacgtactccttcagcgtgcgaacgagttctccgaagtcatcccgaggaagcggtttgggaggtgccatcaagcaccccttgtactttccatcgtgggttaaacggatgcgagtgcaggcctcacacatgaccccgtccatgggtttgacgacttcgacggccataccgttgttaagccggtatacctcgcggctgtggaacgtgcgaacccgctccagctccggttcgtactcaccgagcgctctcaggccgtcctcggcatgtgcgggcctaaatccaggtatcgaacccatcggctcgatcagctgcagcttcagaccctctaagtcggccagctcctccacgagcgtcggcagcgtcttcacggtctccgaggtcagcacaacgttcaccttgacgggggtcaatccctccgacaccgccgcctctatccctctgatgacatcgtcgggagagaaacgagaccgggtgagcttacggtacaactttcgatccaccgtgtcgaggctcacgttcacgcggtccagtccggcctcggccaggtcacctgcgtaatccgcgagcagtacaccgttcgtgacgagggaaacctcctcgaagccctcggcgttttcgattatctcgatcaaatccctccggagtaacggttcacctccggtaatcttgaccttcctaacgccgatctcagcacaggctcggagcagtcggccccactcggcggcgctcagctcggatctcccgggtcgctccccttccctgtggcagtacacgcaggccatgttgcatcgcatcgttacggatatcctaacgcttcggacctcgcgacctagcgcgtcgcgcaagcgagggaccccaccgaaaaatgtgattaagcgggtaggagggcgtagatgttgcagaatatgatcccaccgatcttcggcttccccttgaagcctatttcgatgagtatcgggtacggcttcgtgttgtagaccactaccccctccgtggggtggaagccgtactccatcggatgcacgcccatgtcgattcccttcggcttcgggagtcccgcgtccagacaggcgtccctgagcgcccgggccggtgggcagcatccgtgcgcggccttctcgtaccccgggacctcgaacacgtcgaagtactggcgcttcccgtgcgtccaggtatgtggcggtacgatcaccccgttccatccccggcacatccgcgcggcgttgaccaccctgaggttgtctaggtggccgataccctccatcgtggtctcggcgtgtccgatcaacttcttccggtacttgccgatccacacgaccacagcggaatagtcggccatctctaccatccgtcggtacgccgcctcaccgaacaccttcttgacctcgttctcgtccatcggccggcggccgtccgtgaacttcagctcgtaaaccagcgtcgcgcgctccccgacgtcggctttcttgaggtatttcagtttctcccaaccgtacttcttggccgcctcctcgaacgtcatgcgtttgccctcgacctcgatctcgtcactcccgaccttcacggccacgaccttcgggaccttccgtccccagaccaccagacccggcttcttcacgtacaggtggctgcctcttatcaggacgacgcccggtccctggtaattcgccacgatccatccgtattccaccttgtaatccccgcgcacccaccgttccgccggcgatggaactatgcccaggaacaccgccggtagacccgcgacagcaccgtactcctcgatcgccttgccggcgatgaacgggtgcgcccacacgctataccatggcagggagtacgcggacattatcttgtgtcctccccagaccgtgtcgccgttcttcaccggatagctgggctctgacggagagaaggccaagtacaggtgaccgatcgcctgacccgccgcgatcactagcgccagtgcgaccaatcctcccttgaccggccccagctcgcgtatacgctgtgggagctcccgaaccagtcgctggaccctctcggtcagtttctcctctttcttcctctccttctttttctcctccttttccttctccttgccttccttctctctggattcactcctcaccgtatcgtccttccgctcctcatccgaacgttcttcctcgctcttacccttcagttaaacacccccgagcggcctgattgaggcgatagttatttatattatcggccggtgtcccggtgcgaggggtgcgggaccggccgcagctcagtctggctagagcgcgggactgtagatcccgtggtcccgggttcaaatcccggcggccggaccaagctgaaaatcgttacaaaatccataacgaatccgggccgcccggcgtcgtacctccgatactacccacctcggtaccgttccaaagtccatgacgatacgcggcgggagcgagctcgcccactttcgctgagtttttagggaggtgtttgagacgactcgtagcggggggtaagcccatgaggataacgtggctgggtcatgcggcgttcgaagtggaaatcgacggagtcaacgtgctcatcgacccgttcttaagtgggaatccgaaggcggccaagtcaccggacgaggtggatccggaccttgtcctcgtgactcacggtcacggcgatcacctgggtgacgccgtcgagatctgcaagcgcactggagctacgctggtcgggatctacgagatcgccgtgtacgcccagggacagggcgtcgagaacgtggaggagatgaacatcggcggcaccatcgaggtggagggactggagatcacccaggtgccggcgtggcactcctcggagatcgtcgaagacggggagatagtcgccggcggcaccccggtgggttacgtggtatcaggtgaggaagggtcggtttaccacgcgggcgacaccggcctgtccatggacatgaagctcatcggtgagctctacgagccggaggtggcactgttaccgataggcagcaggttcaccatgggacccaaggaggccgctaaggccgtggagctgatcgagccggaggtggcgataccgatgcactacgggaccttcccgccgatcgagcaggatcccgaggaattcaaacgggaggtggaggaactcggactggacgtggaagtcgtgatcctggagccgggagagtcgtacgaaaggtagggatgacgagcacctttccaaccgagtggtgaggaccgccgtcgggcccgacctccctcactctactttcacgacttcacggttgatcagctcgacgaaccgcgccgctacgaaccccgtcacacacgctgcgatcaccacgcccaggaacccagtaccgaggtacggcaagagtaacgaggacaccaggcccgccaaaacgaggagagtcagagaaacggccacgggtaccgtgactctcctcgggtgatcgagcgcgtcgtcggccagtcccaggaggccgacacgccacggcagcaggcatccggcggcccctgaaaccgcgatggctggaggaaggagtttcacgacacgcttgggatacgcgagcgcttctattccgagcagaaccaccgaagccgctccgcagagcgcacacaacgtcgttactctacggatcacctcgggctccggtcgaacgtcgtctatggtggtcacacgtagggcccctcttagtgcccagttgagcttgtggcggaccttcgggtcctcgacgtcctccacgatcctgtcgatgaggttccgctccatgtccttcgccacactctcgtcccctcgaatcagtatccacaacctgttgatacgacggaagatccctacggagcgcctgtaaccgtacgctcggatctctttcacctcagcgtcctccggtacggccgcgctcagctcttcctccaacctgccgagctcgggcccgtgctccgacagttcggtcttgatcgctcgccaaactcttcgagctccttctgacgggctcacgcgcaacatcagcacacccgtggtaccggatctccgacgggcttttccactattctccggccaccgacttcggtttccatctcgacgcgtggtgtgccctcttccacgactcctatcacctcggcgtttttgccgacctcggtggagcggatagcgtcgagcacgtcatcgaccatatccggacggactcccatgacgactttgccctcgttcgccacctccagaggattgacacccagcatctccgagagcactcggacctcctctcgaattgggatccgctcctcctcgattacgatccgtacacccgacttctccgccatctcgttcagagctccggcgaggcctcctcgggtgggatccttcatcgaagtgactccaccgacctcgagcgctgcgttgacggcttcccacaccggagccacgtcggattcgagatccgtatccaatccctgctgggccgccaggatcgccatcccatggtctcctaccgtacccgtgatgacgatcttatcaccgggcctgagaccacagtctcggacaagttcgacgatctcacccacaccggtcatggtgacgacgatatcgacgtcccccgtgtttccgaccttagtgtcgccggtgatcagatgagcgcccaactcgctcagtaccccgtcgattgaacggtacacacgcttcagatcgtcgatggggaatccctcgcgcactacgatggagcacgcgaaggctacgggcttcgcgcccataacggcgaggtcgttggccgtgcccgcggccgcgagtttacccacgttccctccggggaaaaacggtgggtctacgatgtgcgcgtcggtcgtcatcaccatttcaccgtcgacggaagggaacgtcgccccgtcgtcgaggtcatccagcgtaaccgacccttcgccgcgcatcgtcaggttgggcagcagctcctccttgatcagggactccatgagctctccaccggccccgtgttcgcggcgtactttactcacgtccgtattcccccgccagctttttacggccgggtagaccggccgacccggggggttcagcttgggtgtatggcacggacgctcactacgtaagccgaccggaggaaggatccggccgcaccggaagaagcggaagttcgaaatgggtaatcctcccacggagacgctggtaggggaagagcggaaactcaaggagcgacgcggcatgggtggtaacgtcaagaagggcctcaagttcgcgacgcacgccaacgtcgccgacccggaaacgggtgaggtgaagtgcgtaaggatcgaggaagtcgtcaagaacccagcgtcccagtactacgagcgtcacggagtgatcactaagggagcgatcattcggacggagatcgggctcgcgaaggtcacgaatcgaccgggtcaggaacccgtcgttaacgcggtcctcatcaaggaggaagaggaagaaggttaagggagcagtctctcggcgagttccgccatcccttctcccgtcttgatgctcgtgaggtatacttcgaggtccggatttatctccttagccgtacggaccatcgtctccggagagacaccgcaggcgtctgccagatcgatcttattaacgaccaacacgtcgcctttccggatcatcatcggatgcttgccgatgacgtcctcaccctccgttgccgagaccacgataacgcgtaggtgggcgccgatagggaaatcggctgggcatacgaggtttcccacgttttctatgaacagcacgtccacctcgttcaggtccgtcagttcctcgagatgctctaaaccgtgttgtaccatatgagcgtccagatggcactcacgacccgtgttgagacctactgtcggcacccctaggtccttgaacctgcgctcgtcgtattcgctcaccacgtctcctgcgatgaccgcgaaggagtactcgtccccgtattccttcacgatccactcgatgagcgaggtctttccggaaccgatagatcccagtacctccactgcccggacgttgtgctcgtccagtgtttcccgaacctcgcgggctaagttacggttgacctcgagcagatcttcggagacgtcgacttcaaccttgtgcatgctgctcacccggcacctcaagccgtacggactcgatcgagcaggcatccccaccgtccagcttcaccgctcgggaaccacatttcgggcatttaagatccagcagttcggtcaactcggacaggtcgaacgcggtatgcagcgaaggatcctttagactttcgtcctccgggcgccatctgtgcccgcattccgcacacttgaagtacccacgttcgatctcgatctcgaacttcgccccctctacgggcgttccttctgcgagcacttccagacagaaccgtagttgctccggattcagtagcgtgaattcacctatccggagtcggaccgagagcaccctttcggcacctcgctttcgcgcgacatctaacacggtttcgagtacggattgagccacactcagctcgtgcaagcggaccccaccctcggaacttaaagcacgatcaggtccgtggtccgggggatgaggagtggccggtaagctcgtactagtaggagcgggacccggagacccggagctgctcacctttaaggcggctcgggccatctcgcgaggcgacgtgatactcaaggaccggctggtaccggatgagataatcaaggaacacgcgccggaggacgccgaagtcatagacgtagggaagaaacccgggggcgaagggtggacccaggaggagatcaacgagctcatagttcgggaagggtccaagggcaagaccgttgtccgcgtgaagagcggagacccgttgatattcggtcgtggggcggaggagatagaggtggccttgaagcacggaatggatgtcgaggtcgtgccgggggtaacctcggccatcggtgtaccgacgtccctaggactccctctcactcatcgaaagtgcgcttcaagcttcgccgtcgccacgggacatgaggatccctcgaaacccgaaaaccgcgttgatttcggcgctctggccgaggccgcggacaccctggtggtactgatgggggcccgacgccttcgggaaatagcccgagagatcctggaaaagcgggggaacgagcccgtcgctatactggagcgaggaactaccgagcaagagcgtgtcaaggtagggacgctggaggacgcggcggaaggcaagctgaaagcccgtccccccgccgttgtcgtggtgggagaggtcgtcaagtggtggagggaggtactgggtagggagacgcgttgaaggcgaaggttcgaacgttcagatacctttggcacttactacgcgacgtgatcagcgtaccgaccgtgaagtacgcggtcgcatacgtagcggcgctcctatgcctgggtaccctcggatactggacactcgaaggacggtcgcctgtcgacgcgttctacaccacggtcctgatcctaaccggggtcggatgcgccaatccacccacgacacccgcgggtgagatcttcacggtaggcctcctagccgtgggtctcggggcgctcattcacatcatttcgagggtatttgccgcacttctgcggggagacgttctgttgcgcatcaaagagagtgacgcgatggcacggatagagcgcatgcgcgatcacgtagtgatatgtgggtacggcaagaagggtcgtgagatagcccgcaacttaggggagcacgggttcgaggtcgtggttgtggacaaagacccggaaaagtgcgatcgggccttccgtgacggccacttggcggtgcaaggcgacgtgacctcggaagagacgctactgaaggccggggtggaacgcgcgcaggccgtggcactggtcaccgattccgacgaaactaacgtcttcgcctgtgtgctggttcgcgaccttaacccggacgcgtggatagtggcggcggctcggtccaagaccggtgcaaggaccctgctacgtgccggggccgacgaggtggtgagggtgtacgaggcggcggggatagtcatagccaataggttgatggaccctctgtcgttcctggtgacggtgaggcatccgctggaagacaccttccgagagttccgtgagatcataagacacggcggaatagtcgtcgacgtccggtaccacatcccctcgttaccggagccgttggtgaaggacctctgggtggaggatgagagcgacgtgaaacggcgcctggaaatgcacgaagactcggagactagagaggccctggagaggcttcataggatgtcggacgacgttcattctcaccgtatcatagttcggcgggaagaggacaaggaaaagatcgtggaggcacttcggaggctcgttcctgatcggagtcgacatgactcacaaagaggttttgaaggaggtgttcggagtggaggcgtgagtttcacgcctcgattacccggagcgccgtcttcgctacggcttccacggtgtgttcttcggcctccacgaccttcaagccggctcttcggagctccttggtggtgaccggacctatactcactaccggctccggaatttcagtagggtccacgttctcgaggaagcaccgcgcggtgaacgcgctcaggaagcataccacgtcgaacttcctcgggttcacctcaacgcgtttgggtttgaggtcgtacatctccaactcctcggccttgaccccgtaagactcgagcgtccttctcaggtcctccgtcctccgtctggaacggagcgccaacacggcaccgtattgacggagttcttcggctaactttccggtcgtatattcggtaggcatcacatctacgcgcagtccagctcgttcgagcgcctcgcgcgttctgggaccgacggcagctatatcgacatccgagcgtcgtagttctttcacctcttcctcggaaaggaactcgacggtgcgcgggctggtgaaagctaccgcgtcgtactcggacagtaacccggcacttatcttaggacggtccagcgatacgagctcgacaggacacacgacttcagcgtctaggtcgaccttcttgaaggcttgaaccgtctccctctcgagacccggtgccctgacgaccagagccctcaactttctctccgctccttcagcttctcggcgatcatgaggagggttttccgcttcgattcgaccttatccacgatcagccttcccttgtcgtcccaccaccgcttcgggtaccgcttgtcgcgctggaccttcgggttcagtcctagcttctccgcgatgtgacggagctcggtgagccgagggttcctgacggctaaccgtttcgggactttgcgtccttcggacctcgaccggtcggcgtcgaagtacgccggccacactacgatcctgtctttacccttcaacttgaccgtcggagtctcggccacggttcgtccccctcgggagcgctggcacaatcggtaccaagggaatcttccttcgttttgaggacgttggggacgcctggctgttcgcctcggactcgttctccttaggctcaacctctccctcggcgttcgaaaccttaggttgtgtgggctggttctgggtttcggccccgttcgaattggtcggttgtgcgatctcaaccgcggtaattggtacggaaagtatccgcagtacgtgagtacccaccagcggtacctccagcacctgtccctgataagctagccacgcgaacggttccttcaccacgcacatcactggaacgccagcctcagccagatgtcgacagatctccagcacgtcggataacgtggaagccagaaacacgtagaaccgcaccttcaacccgccaccgacgtcaacggtcctctccccctggaagaactcgtcgagcccgggtggtagctttccgtcggttgggatcgggaagaacagcacgggcatggtggaggagtactgctccagcgggttgaagacgtcctggatagcccgcgatatgttcagctccagtgagtaagcgggcaccaggtagtagtcgtgcttccagtcgtagtccggtccctgagtcgcggagcaatctttcacgacgaagtagcgtccgttgctcgtcgcacccatgaccacgacggcgtgcatcataggtggcacgacgacgaaccacctcgataccgtgactagcggggcgtagagcaccactccgatggcgttggggtgctcggggtccgccgccagcgagatcagcgctgggaaccacggtgggtccgtggaggcgttgggagcatcgtattggggatcctcgaccgggatgttcgtggtcttagcgaaccattcctcgcgcttctcgaggtcttccggggtcaactcgttgcctgcgatgggcttccaccaacctttagctacggctacgttgtacagggttagggatgcgagctcaccgcaccacatgtgatccggtatcccgtccccatccacgtctctaccgaagtcgacctggtcgtagtcgggttcgggaacgaggaagtgcaccgtttggggtttcgagaacttagccttgatcaccccttcagccgttttgatgttgatcgcggtgagttcccacgtgtactcctgtacactgatggcatgtgccgctcctcccagcaccatgataaaggccaggatggagaagggccgaagcatgcggaccaccccgggggattcggaatgaaacggttcgagttagacgtggtgttgccggataagcccggacagctcgtgaaagtcctcgaaccgttgtcgaaaatcggcggtaacgtgatcagtatatcccattcgcgagatggtgaccgcgcccgggtgcacatagtgttcgaggccacggaggatgtcgcccgtgagtactcgcggcgcatcagtgagttggagggcgtcaagatcctgcggttcggtagggggccggggcacgagacggacgtcgtactgataggacatatcgtagacacggatattaaggacacgatcgaccgggtgaacgctatacagggcgcccgcgtcgtggacgtcgacttggagatgccggatccggagcgggagtcgtccgcgggattcacgctcatctacgaagacgaggaggcgctgaggaaagccgtccagaccatcgaggagatcgctgaagagaaggatcttgtggccatcttcccggtggaggtgatacagtgcgtcaggcgcgcctcttcgtgatcggcctcggggccgttgggctgggactgatgcgacttctggccaagaagcgggacgcgtacgcccgggagttcggcatcgacgttcgcgtggtaggagtcgcggattctcgaggtgtctgggtgaaaaacgacctggaccccgccgaagtgctgaaggttaagcaggaactgggtaccgtggcggaggtcggtgagagcggcgatgcgttggagatcatggaggacgtggagttcgacgttctcgtggagcttacgcccaccgacatagaaacgggcgagcccggtctatcacacatcatgaaggccatagagttgggtaggcacgtggtaactgcgaacaagggaccactggccgtagcttacggggaaatcatggaggcagccgaggaagccggcgtcgtcgtgcgttacgaggccacggccggcggggccatgcccgtgttcaacctcgtacgcgagacgctgaagagtgtggacatacattcgatagagggtgtactcaacggcactgtcaactacatcctcactaggatggaagaagagggcatatccctgaaggacgctatcgccgaggcgcaatctcgtgggatagccgaagcggatccgagtatggacatcgagggatgggataccgcctgtaaggtcgtcatcctcgcgaacgccatcttgggactggactgcaccatcaaggacgtggacgttacaggtatcgaggacattacacccgaggccattcggatcgcggaggagcggggctacaggatcaaattgatcggtcgagcggacagcgacggcgagctctcggtacgtccgtgtctggtgccgaagtccgaccctgtggccaaggtgagaggcgtcatgaacatcgtgagactcgagactgacgtagcgggagacatttacgtgtcgggtcggggcgccggtcccttagaaaccgctagcgccgtcatgagcgatgtcctctccatcgccgagagcgttggttagggccggtccgaagtgttcgacgtggtgttttcaggccggaacttagtcggtcatctccatcctaggatttcgagcaacgccctaactgggttccaaggaatccacccttcgtcctcctccacgtgttcgtcgatgacgtctagtatttcggccacggtgggggagctacccagagcgcccttcatgaccctcagaatgtccctggaaaacctctcgaccagcttccggtcgtgattaagcagggaatctacgcagtaacgcaacgtcggggacatactcttcagggcttccacgaacgcatcatcaggacgttcgacggacttcttcaccgcctgggcgaatccggggacgttcaaatctatctctcgcttgtaaacgtgaacgtgttctaagccacgaaacgccaccaacgcgacgttttcggggatcgggctatcggacaggcggagaccggtagcgtacagcacggtacccagctcgacgagcggctttccttcggacttccaggcttccttaccggaagcgagcttaccccccaaatagatggatgccgccccggcggtcgccgtcgtcatcacctgtcccacccccatcttcgacacgtttcgagcacccttctagcggcctcgcggtctccggggtcgacttttcctttataaccgagcttttccagcacgcgcgtgaggaacgcacggagtgtgtccggtctctctccaacgctcttggactcccgccccgtcaccagccggagaatacccttgatccacgtgtaagtgacgtgtgctacggccatcaaagtagcaacgattagacccacagtcgggagcaaagaggagaactggtggccggtaatcccgacgtagatggccgccgcacagaccgctaggtcggcgaccgtaaaccaggtggtggcttcgatggtcccttccacgactatcgcggagatcagagcgatgccggcgagaacgagacagacccctgctaacgctatccacagggtggtgtggatcatcggagccccacatgttcggaagtttggaggaacgttagcttttctccccgagcagtaatcgctcgtaagccgaccgctacacccgcatgcgacggcgggtccgatcgagctcgaaccgaacacacctcaaggacgataccgcgtctgggacgtaaacgcgatccaacagtccgtgatatatgcgcgggtggagggaacgaagggccgggatgaaccggttagctctcccgctctacgaccacttccttactgacgatagctggacccaaggtacggctcaggatacaccggtcggcacccttctcggcgatctttcgagcttcgtcggggtctgtgtcgtccttcagtttcaccttgatcgtgatctctatctcggtcaccgccaagcggtcccagtccttctccccggtcacctccgccgtcacctcggcgtcgattccggccttctccaacgcatggcccgcgttcatcgtcacgcaggcgaggataccggccaaaaagaggtggtagggggtgacatgtccaggttcggccaccttgccgctaacaagctccatcttctcttcctcgaattccacggtgcactcaccgtcgcccaggaactcggcgataacgtccgccattctcgtaccccgtgagttcaagattttttgaaatttttaaatgttttgaagtggtcctcgatctccgccatgagctcactgtccacgagtgttcgaccggcgattcgaaggacgggctcttcgatcacctcgccaagcatcgtcacgggacacccgcgctcggcgcacacgttgaggacttcctcgacgtcgtccggggatacgacagcgaggacgttatcccagttccgagtgatggaggagtagggaaccgagttcaaatccattccaacaccggacttagcgcagacgagggctgccatagctacgagacctcctttagtcacgtctttcgccgctttcaccaaacccctacgggccaactcggggaatgtgtcgaacaaacggcgtgccctctccatcctctcctggaaactcccgtgaataggctcacctacgagcaggaccgaatctccgggctcggccccgcagtccgtgatcggctcgggagccacgagcggtcccatcaccgtcagcgatactttcggttcttcgacgtcgtcctcgatcatcgtgttgccgccgagtatctcgatacccagcgcacgcgcttgtcgccctatccgtctcgcggcctccagcgctcccttctccgtgggtgcgatgatggtgtcgactgcgaatcggggctcccctccggccaccagcacgtccgttgaggcgtgaacaagggccgacttcctcaccaaccggaacgcgtaggggccgtcggagctgacgacgagcttcccatccaccctcaccacggccgcatcgtcgtaatcggctagaccgacttccgctcgaccgaactccgggagtaacctcaccaccttgacgtcgtccacggtgtacctgagcacgtgccgacgcagatcttcataggagggggcccctcgggcgctcactccgcccgtcccccgtaagctccttcttcaccctctcgaggagctcccggacctccttccacgtttcgatccactgaaccaccgctgtgggattcaattcgaccgacgttcggctgagctccagcgggcggggatcctctcctatcctacgcagtatggtcttgatcattctcctgaactcgcttcggtcgagctttttgggaccttcctggacgagctcttccttctcgacctcgtaatataccacgatttttccatcggtgaggaccgcgaggacgtcctccggtctcacatcccgttctttgacgaggtaggcgaagtacctgagcagctgatcacgcgcttcctcgagcctcccaccgctgtttagctcaccaggtctcttcgtttcgattatcacccggtcacggacgaggatatcgattctcctgggtctgtcttgaaaggttccgacttccgacccgactcctacctccagcatcacgtcaccaggacataggtcccccaccacctccaacgcgtcctccaaggtgcgcgcgacccagtgctgtaagaattgagagggtatctccgagtgtccagcgacttcgacggcctctcggaaccgcaggtacaactcgtccagaacatccaagaggggggtcccccgcacgtgggagggctggaagcgttccttgagatactcggactagtgttcgtgggatacacgttacgtaaggttggggtcttttccaaagatacgccgtcccatctcaacgcgtacgtggtttatctggccatgccggcgttagtgttcaccgcgatgttgagggccccgattcagggactactccagcatctcaagctcgtggtcatctcgatgttgctgtcggtcatgtgtgccctcatcggtttcgcggtcgctcgtaagatggcccgcgatcggcgcgatgcgatggctgttgccctagcctcggggctggggaacaccgggtttttggggtacccagtatgcctctccacgttcggggaaccgggtctcgaagcagcggttttctacgacttcgggacgaccctgtcggtgatagcggcttacctgatgctgtcctcccgccgcgaaaacccattgaagatgagcctacgttttccgcccgcccatgccgccgtcgcgggaatgtgttgggcggctctcgggcttcacctacccgataccatccgctcgactctgcagctgctgggacgctccgtagtgccggtcatcatggtctcactcggagcctcacttcggtgggatctccccaaatccgtcatcagtgtgataccgaccgtctgggtcgttaaattgtgtgcatcgccggtagtggcggcgaccatcgctccgtcggggttggacggcaaagtggccgttctggaggccgcaatgcctccagccctgatgaacttggtattggcggagctcttgggactgagaccgcacgtgaccgccgccttggtgttctcgaccaccgtgatatcgctggcgacggttccgacggtgatctacctggtatcgggtgggggcggagcgtgaaagtcccaaccgtatgttatcgggacgtgcagcgctgcgaaacctccgattggtcctcctatgaggagtatctcgacgacgtcctacgggaaatagcctcggaagagccggaagtgctacggtttgagatcggcggatgccgacgaggtacccttcacgcgatcacggcgttcgacgtccttttccgattgtaccgcagtaagcgtagggtgggtaaggtgatgatcgacggcgtcgatgtgaccggagtgttaaaacctatctacgaacaggtattctcgaactacgacatcgtgcgggctaaggtcggcatcccagagggacaccggcatattaggacggagatcgagaccagggacggccgcaggatcgtgtttcaagaggcgaccatgtccaacttactcagggcgttcgtaaccgtgaagaccaggccggatgtagtgtacgtggagttaaagcgtaagaagttcgacgtcccggagtacgcggagtggcagctcatcgagacttcaacgcgtactcggcggcgttgattccagccacactgccctgataaacggcagaaggcacgtttcggtgcgggatcgtcgtgacgtctccggcggagtaaactccctccaaggatgtgcgcatctcactgtccacgactatgtaaccgcgatcgtcggtttccacgagatcccgaaacggttccgagttaggcactttaccagccgctatgaagacgccctcgcatggcaggatgtccccgtcggagagctcgacgccctcgacgcgctcatccccgacgatccgccgaacttcgtcatggacgacctccacattgcggcatgatagcacgcgttcaattaaggccctatctggggactcgagcttaccgtccggagttatcacataaacgcgctcggctatctccgagaggaagagagccgtgttcgcagcgtgggtaccgctcccaacgatcgcgacgattcggttttgaaaggcgggaccgtcgcagatcgcacagtagctgacccccggccttcgagctctcgctccccaggaacccccaaccgcttcggcctggcgcccgtggcgatcaccaccgccctgcactcctcatccaggacacggaaggtcccgtccgtcagctcgatcccttcaactctgttagagtacttaacgttcagctctactccgaccgtttcagcgtgctccaccattcgatcgacgagctcgtatcccggtgcgggtgggaaaccgggatagttcccgacctcgggcgccgtggtgagctgcccaccgagctcctgtgcgacgacggggacctcggccccggccctagcggcatgaatcgcggcggagagcccggcgggtccggccccaattacgatgacgtcatacggcttcgccatcggaagcctcacccttgaggacgggaaggaggtcactcactcctcctcagcttatcgcagaaatcctcggccatcgccaggataacgccgaccgggggtttgcccagcggctcgggcagtacgttggcatcaacgacgtaaacgttatcgtacccttccagcgcgtacctgtcgtcgaccctatcggacaacgttccaccgggatgcgcgcccgaaggttccgtgacggcgcgtactctacctcccatcctcgagatgatttcgcccgctaccgcacatccttcagcgaagagttcggtctctcggacgctgataggtttctccctgccgatgacgtcacccgagagttcgtccgcaattttcaccatgatcgagtatttaccttcgtaggccgaagttcgatgaggagacaagatgtactcgtccatgtcgacgactatcggcatttgaatgccgggttccgcctccaggtcggacacgacgtggatgtaagcgtccacgaacagcgggccgtctgcgtctatcccgctacgctccaggagccggggtgtgccgggacaacccgcgcacaatacaacgatgtcgtcggtttcgagttccactgtttgggatctaagtacgatagcggtcgctttacctccagaaaactccaattgaatgcacttgtctctcagtacgctcactccttcaggcagctcgtcctgtggaacccacttcgcatttctcggacactctaagcattctccacacccatcacacagatcgaaatgaacggatttaggcatacgctctggctcaagtccgacgtcctcagcggcctcttcgaactcaatatcgaggtttgacacgaccgagtcgggtgttctgcgtacctcgcatgtcatatcgcggagaactcgctcaaatggcctccgaaggccctcaggaccccaaaaccagaagttacccatcgagtacctggcggagccaccgagcccttctccgtaataaactctataatgcccgaagcgctccgattgcagcctgttctcggggtgggtaatcacggtaacgtcgtatcccatttcatggactcgccgcgctatccaacatcccgagggacctgcacccacgatatagaccttcaacccgagccctgatagtcacgcgtcaacgtgatcctttttagcagctccctttcccagtatgaggggatagagttgccgacttggaggtacgtacccccggttctactcgccatactgttatcatcggcctcacccgttgcagcaggcgttgctgagatgtttcactcggaaatcaacgaatttagggagtcattggggttatctccgctgaaatggagcccgagtttggcgaggctggccgagcagcacgcggcgagaatggatgagaccaacgaattgtaccacgagcgttgtcaggggtataacttcgagaacgtggcgcgtgttccgaacacgggagaacctaccctaacggccaggttgctcgcaataaccgtgctttccagccctccacatcgatggaacgttctggaagggaattgtgagggcgtcggtgtgtcgatctcgggagattacgcggtgctctctcagaagatatcacgcgcttccgacgacgccgtagacgtccgggtggaggtaccgccgtttcatggtgtagtatcgacggcgcaccgcgatgatgtggagaaagctgtattggatgctatcaaccgagagcgcgagcagtcaggactccctcctctagttctggacaaggaactctcgaagcgagtcctcgaagagctccgtgaggccgccagaacactgtcggtgacttgctcgtcggggacgctggtgatactgacacggttacagaaccccgtggagatcgccgaggatgtgctcggggtacttcgcgccgtacctgccggtcgtaacttctgggttccgaaaggtcgcttaggggtagccgctctcgaagttaccgaggtgaccatgccggatgggaatcgcctgaagctcggagtggtgtgggtgggaataaacgtcgtcgaagaaatggcggggaagaaccgccccaggcgagtcccattcccatcgtacgttgccatcgcgatccctctgtgctatctcatcacccgccgtcaaacgttctttaccggtcgaccgcagcgctagtgaggggcaccgcggtgaagagacgcatcaatgtcgcgatcgccggtcacgtggaccacggtaaatcctcgctgctcgagcgtatcaccggggagtttcctgacaaggaggagttcgaactcagccgtggaatcaccgcggtcatgaaggtgataccgacggaatggaaaggtgtagagatacgcttcattgacacgccgggacactcggacttcagggaggaagtgggtaaggcgctgttagtgtcggacggcttagtgctcgtggtggcggccgacgacggcgtgcaggccaggacggaggtcatcatcgaggaggcgaatgagctcgggctgccagtggtcctagcggtgaacaagatggacaaggagggggcggacttcgagcgggtagtcaaagaagtcaaagaacgagggcttgaacccgtgactgccgtccccacctcagccaaaacgggtgagggaatcgaggacttactggacgctatcgtggaacacatcgaaccgcgcggatggggagacccagacgaggggacggctttcctcgtcgtcgacgtcggggaacgggaaggactcggttcggtagctaccggcgtggtacgtgcgggtactctgaaacccggggacgagctccgatacgagggggaggtctacaggattcgggccctcctttctccggacgagaaacgagtgcgagaggctcggccgggtgacgtggtgctggccgcgatggaccgtgcgccggaagcgggagtccttctcacggagacaggagggtacagggtcgagaaccccgaggacgtgcgcccttgcgtccggtacacggtcgaggtagacgacctgaggaaggcccgggaggtactcgaagacatagaaaggcggaatctcggggtcgaaaccgagatcatcgacgaacgccgcgttaagatctcgtgtctcggtgacgtacagttcgacaagatccgctcggagctcgaggaagcgggaatccaggtggaggttacgtccagggagttcgagggagtgaaaaccgtcggtggaagggcggtgggtcgcttcggtccggtcgaggtcgaggtgctcccaagggcctctgagggtgttcgagtgttcaagcggggtaaggatcgtgccaccacgaaggaggtcactacggcccatctagtcgcggaggagctcggactggacggactcgtcgtgaacatactttccgagggcgaatcccctcccgaagccctggcggaggcgatcgcggcggcgattgaagaggccgggatcttcgaactgtaccccatcgagaacgtccttatcgaggtagacaacgtcgggaaggccgcctccttggtgtacaagcacgaggggcaagtcatcgaatcggacgagtcctcgatcaaggcgatagtgcctgcgccacggctcaacgagctcgtgagcgatctcatgacggagacgtcgggacgggccagaatacgattgctctcgtccgcaggtgcgggcggcccgatactgtccgtagatccgggcgaggtgaacttcgggatcgcgtacatccccaggagaggtccttgtgacgtcacctccgtcaagctgaccgggcacacccgtgacgccaaggtggaagagctgagacgtacactgaagatgttcctagcggaccgagaagaaccgaacctcgtgtacgtcggcaacggacccggtcacgacgtggctgtcgaggccttaggggacgtgctccccgaggccgagatcgtgttagtcgacgagcgtgagacaacgaaggaagccgtgtacaggttatcgtcgggtaagcttgagaacgtccgatccagggacctccgagatcacggagtggcggcgctcgcgatcgcacgtcgcggacaacttggtcgtagggtgaagaagcgcgtggatcgtgagggggtcagacgggccgtcgtcacggcttttggaggcggctctcgaaggttcggcgactactccagactgccaatacgcaatccggaggagttggaagaagggacgatgctacaagttaaggaccctaacgccatcacgacggggttatcgaaaggcgaagtagtcgtgttccacggttggagggaagatggagggatgatcgcgtcgacgttaaccgggaatcgagtgatcatcaagccgcgagacggacggtcgctgaagaatccacgtcgattcttcgaggtgttcaggccggtgaagccgaaacgaagctcgcggagaggagaggggtgagccgacgtgctggcgttgttccctctggcgcatccgttcacgatcacctctgaagacctccggagcgtctggcgttggatcaagacaccggacgttatacgagtgtacaccgacagcgagtcgctagccgagctgctgaaacggccgttactcagggccgtccgctcctcactccgaccgcctacggtctcgtggacgggtccttgcccggaagaggaccttcgaagagctggtgccgaggtagagatggacgaacatcgaccgtttgaaacctcggacgtcctcgcactgtgtacacgaacgttcgcgctcttcctgaaaggtgtccggggaggcgccgtagggttggtggggtttggggacctcgacgatcttcaccgttacctggtcgaactagggtatccgcgcacgttcaaggcgacgtccacgctcatgttacgtcgccgagaagtggagatggatgaactatggaaactgttcccggcgtgggcgggggatgatgtcgaaccactgctccgagagaccctgaagcccgacgtcgtggaggacctcctggaggaagcgaggtctctgacgtcctcgctgggaccgcgggtccgagacctagagagcacccctaccggacgcctgctactagcatcctctcagaccgtgtgggtcgtgaagggggcgctgaacgagtgatcttgggagagtacgtacttcgggatctattccccgacttggacgaggaccagtaccagccggccggcatcgatctcaagctggatagagttttccgcctcgagggccggggggctctgttggagggcgacgataagcggctgccggagtaccgcgaggtcgaaaccgaaggtggagtattcgagctcgaaccgaacgtcccttacgtactcgaactggcgcccgagctcgagattcccgaggatactgccgtcttattcctcccgcggtctaccctgttgagatccggtgtttccgtgcacacggccctcggcgatccgggtttcaggggcaagatcagggtcctcgccgtcaaccaccacgcggcaccgtaccggatagcccatggagaacgagtcgttcaggccgtgttcctccgggcggaagacgcgggtcggtacgagggggactacggccgatgacagtggtagtggtcgtgcggaaaggtagactcgtccgatcagcgtccggcggcgtgctagaggccgactcgtcgtctactcttatcctcacggaggagatgaacctgttggtggacaccggaggtgaggatccgaaaggattgatccgcgatctcgagccgtacggcgtcgacgccgtcgtcttcacccacggacatcaggatcacgtaggcaacgcccgggcgatcgccgagacgttccacccggagttctacgcgcacgagagggaggccggatcgatccccgtcgatgtggatcccgtcgactcgttcgacccgcccgaaggtgtcgaggtcatcgagaccccgggtcatacccccggccatatatccgtagtcgtggaggaccggatcgtgatcgccggggacgcgtgtccaactccggataacgcgttggaacgcgtaccgccggcgatcagttgggaccgcgaactcgcggaggagtccctcaggaaggttctgtcatatccggtggtgataccgggacacggaatacacctgaaacgctagcgcagggggaggagggacggatcctcgtccggtggatgctcgtcacacgcctcgagtagcatcagcgagcgcacctccggccctatacgtcggagctccgctacgggacatccatcaccgagccgcgagagcgcgtccgacagcagctctcctaggacttcgatatcgtccagggtgagacccttgacgtagaggacgatcccccggcacccacatcgacggacgaagacttccaccacggggacccggactggacgtcctaaaagtccggacagttcctcctccagcttccgagcctcctcccgcaggttcaccacggacacctcgttcacccgccgtgaaggttttttccgcacgacgaggggatatctccggggtagcggtgtccgtcgtccattggtccctctacgtcaactcagcggtgatttcggcggcagccgctctggtactcccgaacgtaccggtgtacgtgtacaggcatggcggggacgagttcacggccagcctagtcctatcgacgttctcgatcacgatgacgatcacttccttggcttcaacgagccttctggagggggttcgggctggccttcccatatgcttagggtgtctcggctacggctgggcccttctacctttcttcgttcacgattcggtggcatcactggccttcgcccgagctcttcagggggtctgttcggggttctcctttcccgccaacgtggccgccgcactgcagttgggacgttccgcggtgtccaaaaacaacttctggtccaacgtcggtttcatcgtcggctatctggcctcctcccacgtacgggacccgttcgggatttgctcggtcctcagcgcactcgccgctgtcttcggtctcccgctcttgacgttgaggatccaatcacaggaagacgtgagcgcataccacgggtatccggtagcgttcggagctgcactcgcacttacgctagcctcgacgctccctaactccgccatcacacttcttgctcccaaatatggaggtgattacgggctcgtaatcgccatgatgacagcggttggaggagtagctcaactcctaggaccccggctcggtgaactcgagtcgacgctgctggcggtcgtactttgcgtggtcagcgctgctctcggttactcgctagcgagcgtgctcgcggccggaaccgccacaggcctcatgtactatgcggccaacgtctacagcggtggaggtaggggagttcgggccgtttccacggcaataggagtgggttacgccgtgaatcagacgatagtgggtgcgatcctgtccgcgggactcgacggttggaggttcgccactctcatggcggcggcgataacactggtctcgctcctcggggtgaggcgttgagcggcgtcgaggagcgtcttcaggaagttcgtagaggtgcgctgatcggaatctacggaaacatcctcctatcggttctcaagatagcaataggacatatcgccagcagttgggcgctggtttccgacggcgttcattccctgggggacaccgtatcttccgtgatggtacttttgggcgccaaggtcgcccggaaaccgccggacgcccgccacatgtacggtcactacaaggccgaagccctcgcaggactgggagtctccatgatggtcacgttcacgggtcttctactgctctgggagtcgctgatgcgcctccgtaacccagagccaccgacttccacactgcctttagtagtggcccttggaaccgtggcagctaaggaaggtatgtaccgatacaccctgcggctggccgaacgcgtcgggagctcggcgctgaaagcggacgctaagcaccaccgtagtgacgccctatcctcggtggcggctagcgtcggtatcgccggggcactcttggggtatccgtgggcggatcctggtgccgcactcgtagtctcgctgatgatcgcgcacatgggtctggaactgtgctgggagagcgtccacgagcttatggatgtggcccccgaggacgaactactcgagcgcgttcacgagatcgtggagaacacactccaagacgtcgattttgacgtggaactcatcgcggtgcgcggcaggaagatgggtccggcttaccatttcgacgttttcgtagccgcggatccggaggcacgcctccgggaactcgataccgtcaggaaacggatcgtggaggggatccgccgagagatatctgccgccgagctcgtaaccgtggagttcgtcccaatgtaggtatccaattcgaaactcaggaaccgacttcactctttgtacactcccaaccacctgaacgccccttcaccgtcgataaaacccgccaatatcgtatccttagttatagcaacttgtagggtgccactcaagtctgagataaccggaaggccaattataggcacattctcaccattaactttaacttccaccggtattggacttacccgtaaagtaaccgtctccatacctgtatacaaaggtttatatacaggtttatccgaagcgctcacaattattctgccctcctcatcgatattggcctctattcctttaatgggattttcaatatcccctaattttagaggaggagtaccatcggactcagctactacactacacccattctctgtaacctcacatttaatcgaagcaagatccttaaggatagaatatagtatctttttattattccctggaagctgaatctccatcattcctacgatagctagtctatatttattcggcacaatatcttcgaaatcaaaatcgtttactcgaaccttccgcactgacccccatttacgtttaattacgtcccaacgtctaacattaatgtactcattttctaacttaatttcaaatattccattatcactatcatacagtaagattctatcctctaagtttattatagtccaatccccatcatcactaattactaccacactaccgaaagtttcaatattacgtgttttcaaacacccgtcgtaataacaccataacttaattttcccatgaatgaatgtatcaaccaccctaatatttacaacaatatcaccaggtacatcaccagtaaccttcatcagaactttaccatttactagtaacttattattcctaacttcaatatcgatagtatcgttattcgaaaatttaaatgccaaggtctttgtcgtgactttatccccttcaggaagtttaatattatcaacaagaaccttatattttaaatgttttgaacttatactagccaatggaacgttagtgcccaaacctttattaacgatttcctcaattataaaatgttcagattttatcttatttattttcaaatcgaacccaatctcaatacttacctcgtacagtccttcagaggcggttaaggcaattttatcgttccttttaaactcgtatgtttcagtagtcgtctctgatttagcatttattaacactttgttttcagttggaacaatccttatcgtatccccgatgtttaacttacttaagatcaaacgatcgttcagctttagactccgattggcaaccttaattcgtacgatgttcgcagaagtgtgaacttctaagggatcgtcgtatgatatatttgtaatcatatgttttgatggatcccattctatttagaccttacaggagcgagcttgtgaacctatgttgacagttatttcgtcagtactcatccaggtccccctggcgttcaatcgccatattttttacgcggagcgattccacatcacatgctgatgggatacgttgtcattaggattcatgtggcgtatatcgcccgaaacctccaaggagcacgtagccatcgaatcgcggagtcacccgggggatctcgatgctagccgtagccatcgctggagttcgcagcggctgcggtaaaacttcgctctcgatcgggttggtgagggcgttacgcgaggagggaacccgagtgcgtccctttaaggtcggtcccgattacatagatcccacgtacttggaagtcgcggctggcctagaggcgttcaacctggacgtctggatgatgggagagagcggcgtggtggacgctttcgggaggtacacccggagatgcgatgcggcggtcattgaaggcgtgatggggatgttcgacgggcacggggaaggcaccgtcgaggggagcaccgcccacgtagcggcccttttgggcgtcccggtggttctggtggtggactgtaggagttatgctacgacggtcgcagccgaggtccgcgggttccgggacatggcccatgagatcgggacccgactcgaaggggtgatcctcaacagggtcggaagcgagcgtcacgagcggctgctgatcacagcgctgaggcgttactgtccagatgttcgggtgttcggggtaatccccaggctcgaggatgccgtcataccggacaggcatctgggtctcatcccggcggacgagcgcaacgagttcgccgagcgggtggcggagtactggggcgaggtcgtcgccgagcacgtggacctcgacgcgcttcgggagctggaagtcgaagggccctcggtcgagcccagtccaccacccgaaccggagcgcgtcgagaccaaggtggcggtaatctcgggtcgcgtgttcaccttctattaccgggagaacttacgcttcctagcggaatccgcggaggtcgtgccggtggatccggagaaggatcggcttccggacgtcgacgccgtgtacatccctggcgggtaccccgaagtgtacgccgataacctcgacgaccggttgatgagggacctcctggagttccacgaggagggaggcaggatcctgggagagtgcggaggactgatgtacctgtgctccgaggtagtggacgcggacggcgatcgtcacgatatggtgggagtgttcgacgcggtggcacgaatgcgggaacggttggccgcgctgggatacgtcgaaggtcgtgtgaccgacgcgcacccgttcgcgccctccggatccgaaatccggggtcacgagttccactactccgtcgtggacgttagggaggatctggagtacgcgtacaggctctcacgagggactggggtaagagagggcctggacgggctcgttaaggggaacacggtagcctcgtacacgcatctccacatcaggtcggacggcggtgtgttccgcggtctagtacagtagggggttccgtcggatggtcgagatcaccatcgtggtggacaaccgggtcggtatggtccgtgatccctacgtcgcccggcacggcctggcgatcatcgtggaaaccgacagctcgctgatactcttcgacacgggtccttccgcgaatacgctggcgaacaatctgaggctggcagggttcgacgcgagcttcgaccacgtggtgatctctcacgagcactgggaccacacgggcggtttggaggccgtcgagggaaccgttcaccgacccggcggcggtgaggagactctcgacgacgacgtggtcgtgacgcggacgttcgagggagagtacgagggcagaccgatgccagaacaggcgttgatcgtcggggacgttgcgctgataggatgctgtcacttcgacctggaggagctgctgggcgagtacgagccgaagacggtgatcggcggcctacatctgatgggtgcccccgaggaggaactcgagcggactgccgagctgttccgggagtacggggtccgagaggtttacgcgtgccattgtacggggctctcggaatccgcgtacctggcgaaggtcgtgggtggagaacccgcgtacgtgccgatgcggatgcggttctgatctcggtcccccaaggggcgcctccccatctcgcgtcgggccccacccgacaggtcatcccggcctcggacaccgccgtttcggtcatcggtcgccctgtgggggcgtatcctcatcggcaggttcagccgccgcggtagggggccttcgatcatccgaatgtcaccagcgacgggcctcatcacgcctcgactcgggccacgaagaaaccgtcggtatcgtggcgatgtggccagatcctgcgggcctccggcatccttacaccgggtgaagcccattccagaggaacatccacgagctcgagaccccggtagcgccggacgagacgttcgatcaggcgctcgttctcggtgagcgtgatcgaacacgtggagtacactatcctgccgcccggcttcagcagcctcacggcgaccttcaggagctcccactggagctgggcccacttggtcggctcgccggttgtctcccgatcccacctcttctcgggcttggaatagacggaccccgtacccgtgcacggcgggtcgacgaggactaagtccgcaatcccctcacccagctgatcgggcgcgtcgcgtgcgtccatgcacagtgtttccacgatgtcgtccgcgtggaactgcctgacccgcttcttcagtgttccgaacctcttcgggtgcatgtcgattgcgatgatctccccacggccttccatcagctgggctagatgggtggttttcccacccggagctgcacacaagtcgacgacggtcatccccggctcaggctcggcggcgtgggcgacggctgcggaggccttcgtctgagggtacacttcacccttcttgaactccggggtcttgatgaccggtgtctcggcggatcttatgcggaggacatcggggacgtccgggtcccgttctgcttcgatcccccttcgcttcaaccgtctcacgacttcttcagggtcggacactaaggtattgacacgaacgtaccgggcaggtctccggttgcaggcttccaggaacttgcgcaactcgtccatgctgtcgaaggccgagcgcacgagctccacgtaccacttggggaagttatagcgggccgcgaagcgggccgtagggtccctaatggaactgatgacttcctcggggttcacacgctccacctgtctgaggatggcgttggcgaaacgggcgtgcttgggtccgacacgctccttgacgacgtccactacggccttagtgacgggccccggatgctcacggcgccagtggatctcccacgtgcctactcgtagggcgttgcggaggtacgggtgaaggtcctcgaccgtggaaccccggagtactctgttgagaactaggtccacattacccagaactcgcacgagctcgtgggctaatgcttgaacgaatctatgcctacgcccgcctatgccgcgaagggcgttacggagggcggctttgagcgagtggccccgctcttccatgtcggtgagtgcgtcggcgagggttccgatgacggtgcgtatggggggagaagcccccttactccggaggtatagtcattagacgctccctggccttctccgggcccagcttcttcacggttctgttgtacgcgtagtagaagatgaacggtcccggtaccatcagtgcgatccaccagtagaagctcgtcgggtcgctgatggcgatctcacccaggaagaataggctcagcacggtaccggtggctcccagccagttgactgccttcttggtcttgtcacccaacggggccttctcgtaaatgtccggtcttacgaacttccagacaagtccggtcatacagatgaacaggtacgtgaacagcagcgctaccgtcgtgatgtccacggccgccaggaacttaccgaccgcccacgtcaggatcaccgagactaccatcaggaccgtcagtgcccagtgcggagtaccgaagctcttgtgcaccttagcgaacaccttcgggaacatcccgtcgtaggcccaggcgaacgtcatcctgctggtcgacaggaacatcggcggcaggtcgcttaacagcgcgatagcggccacgaacgctacgtatcccgcgagtgcgctcggcattatcggagccatcgcctcggggacggtgaagttgctacccgccttgtcggcgagcgccgccttagcgtagatgtactcccaaggcacggcgtggtacaccgcggccgagtacagcaggtagtacgccgtgatgatccccagcgcgatcaacatgcctctgaacacggttttctccggcttcttgacttcacctgccgcctgcgtgcccgtctcgaagcccacgtacgcgaacaccagcgtcgcggccgccgagaatatcgcgctgagggtacctacgtccttcggtagtcctccagcctgagatatcagcgatttcagcgcggtcgttccgccgatcgccttgaggtactcggccggagagtgtgcgaatccgtacccgactacgatgaagaaacccgtcagcaggatgaagaacatcacatcgacgacggcctcgtaaatccggattcctaagacgttgactagccacgtgaagatgatgataagggtcgccacctcgagtgtgtgtgcgttcaaccacttccctgccgccggtgcaccccagaacttgcacatcgccgccaacagtgccacgtctccgatcgcgatcgctacgaaggctccgatctcgcccacgaatcggctccaagagctgaagaatgccaagaacgggtcgaacagtcggctcacgtacgtgtagtgaccgcctgctcgtggaaccgccgcgctgagggctcctgctacgataccggctaccaagctcggaacggccccgatcaagaacgccaacggaacgtaaggaccgactcccggtgccttgacttggatcatacacgtcaggacgttgactcctcctccgatcacggtacaacaaatcgttgaaatgaaacccaacatggtgagctctcgcctgagacctaccttctccattttagcgtccccagccacttccgaccaccgcccggaaatcgctttccggttttatcttacctatcccgcaaaggccggcggataggaattataacctttccggttcaccttcgacctttgagcgcgccacgggactttaaaagtcggaacgcctttctcacggcgcgcctgattacgtcccgctttccgagaccgcccagcgccttggcggccttacgaatgcttccgcattccactaggagctccaatagttcacgatcccgtgggctcagggggatatcctcctcgagggcccgcttggcgatctcgatgggatcgtgaccctcgtacggaaggtgctccgaaaggatgggttcgtcgaagcgctctacccattcgaactcgatgatggtgacgatatcgtcatctcggaggttcgggtagtgatctcgaagtgccttcagcaactcctcacggttttcgaatccgtcgagattggcatcctcgtccgtcagatccctgactctctttgttcgaacgttcgtgatcctgacttttccgtacacgtagccaccgcagtgaatgtacaccaccttaccgggtcgcgctccaggaacacgtcccactcggatcgtcgcccgtttctcaccccggaggagcttatccctgtactcaccgcttatctctaggtgcttcgagattccgtaggtcatgggggcgtggaccccggttcaccgcggaggtggcccctcgaagtcctccgggtcgtactcgaactcctcgtcttcctccagacgacccagctttttcaggagctcgcgggccagcagccagtacaccagggccagcgccttcctacccttgttgttcgttggaatcgccaggtccacgttacccgtgaagttgtccgtgtcgcacagtgccacgatcgggatcccgacgctctgtgcctcgacgagtgcctggaagtccgcacgcggatccgtgaggacgatcacctcgggctccaggtatccatcgtactcggggttcgtcaatgtgccgggcacgaacctgcccggaatcgcggtggtcccggtggcctcggcgaacttgctgacgggcttctgaccgtagtagcgcctggacactaccagtatctcgtcggtgttgtacatggacaggaagttggccgcgatccggatgcgctcatcggtcttgcgtacgtcgatgacgtggagtccgtcggcccgcgtcctgtaaatgaacggctccatgtccttcgtcttctgctgggtaccgatgtgcacacctgccgccaggtagtcgttcagcggaacgagcaggtcgtcgttttcggacatcgagtcacccccggaagatacgtccggggagaggggttacacctcgacttcgatggcaccgtgtggacaagcctgctcgcagaggccacagccggtgcagtcatcctcgttcacgacgaccggcttgtcgtcctcttcgtcgaggacgtccatcgggcaggcttcgatacattcaccacactccgatactccgacgcacgcgtcgtagtcgatcacgaccttcggcaccttcccttacccccgcataccctctatctgcggatcaccacgacgggcacaacgccctcgtcgaactcccttttagcaatttccagcgggtcctcatcgccttcgacctctaccagcacaggtgatcccatagcgatctgaagggcacgtgctccaacgatccttgcgatctcgaaccgtgtcagatcctccataggatactcccccgtggatcttgggccggaactgtttatacgttgcttgagtacacaatacgtgaactctaaaactcaaatagtgaacaaggttcttcatcccttacgcggggctcggataagcgtgtgtccgggaacccctcgggggcacttcagagggtgaacgatctagagctcgatccgattgggctcctgaaggatgccgtagccactccgagtgtaaccggagaggaacacgagatgactcgcctcctgacggaagtgttagacgagcacggcgtgccttacgaggtggacgagatgggcaacgtcctcgcgggtgacctgagcggactggtgctgaacgcacacctcgacacggttcctccgggcgacgggtgggaagttacggaccccttcgatcccaccatccgcaacgggaagctgtacggacgcggtgcggccgactgtaagggaggactggcggctgcgacggcggcggtggttcaagggtactacgaggagatgccgatgggcctgttggcgactgtcggggaagagtcgagtagtgaggaggacaacgggaccctccacgtctgcaggacccgtgagttggaggctcgagccggaatagtgtgtgagccgacggacggtcgagttcacgtgggtgatcgaggaaggatcacccttcgagtcacggtgcggggtcgcagtgcccacgcctcgaccccggagatgggaaagaaccctatcgaagccgcatctcgcgtcgtggaggcgctctccaagttgaggcctacggagtacagactaccggaaatcggcaccgtgaggtcggacttaacggtcaccagaatcgaagcggacgggccttcgaacgttataccggagcggtgtgagatgaccgtggattacaggacggtacccggagagagtacgaaggaagtgaagaggcgggtcgagagggtcgccaagcgggctgtgccctcggggttcgaggtgagtgtgggtatagagtcggcttctcgggccacagttgtgaacgttgaggcaccggtggttaaggctgcggtaatcgccgctcgtaaggtcggcttaccgggtaagctagacttcaaacggggacactgtgacatcgagtacttggtgcatgaagccggactagacgccgtgatcctgggtcccagtggtggaaacatccacggaccggacgagtgggtcaaagtggaggatgttgtgcggtgcgcccgagcatatctggcgtgtgcgaacctcctccccacaccacattagccgggggcgatcaggtccaggaccaggtcgcggaactcctcctccatcttgatcggatcggctgccggcagcccgaactcgtcctcgattctttcacatacctcgcgaacctcttcctccgagtaatccttgccgttcacgctcacgaattgtaccctcgctcccgtgagcagcgtgactacttcgacgacgtcctgaagcccgttaagcagttccggccgtgtagccacgaccatgcggtccgggtcgctacctagcaagatagtgagcgcggctagagacccaccgcgtcccgtacccacttctaacgggtcagcggtgacccctgtctgcgcacctacgaggatcaagtcgggttcgtactcctcgtccagcttcttcaccgcaccgtaaacggtaccggccgcgtgagccatcggtaggacctgggggatcaccatagcctccgagcccgtgagcaggctgctaggttcggtccctaccgaacgtacgttgataccctcttcctccaggatcctcctggccgtgttcaaggtggtgaacttccctgtacggcggccggtacctacgatcgaaactacgtcggcgttcacgccctcctcacgcgccttcattccgtagtgaaggtattccaggtaaagttcgggatcgctcgtgtcgaagtactggacccccctcttatgggcctccaacttccagttcggatcctgggcgaccatgtggagacggcccatgttgtacacgttaacgcctttcacgacggcctcgtccacggcctctcgccatttgaggtagtgcacgtcctcatcgaggacttccttggtccatatcagccactccgcttcctcgagcagttcctccagatcctccatcggtctgatctcgagctcgggaacgtcgtcaccgacgagctctttggtagtttttccgaccttctcctcccgatagtcgcaaataccgacgatctcgatgtccgcgaacctcaggattccggcggccaccttggtgaacggcaccatcacggcccgagtgacttcgggatgttccaacggcttcaccccgttcggatgccgtagcggagtgtttaaccggtgagatctacgatcgtaaacctacgcttcggattctcgtactcatcccgacgcatgttcagtacgatgacgcggccgaccgtggggcttattccgacttttttctggaactcagtctgttcttggaacgtggccgtcgatatcacgttgcagccgttccaaacctcgacggcgctcacgtgggtgtgtcccacggcaaggacgtgcggaagtttccgtatcgcgaggtaatcctccggaaggggagctatcggaacggaccctccgtatataggtaccaggtgacgcgcgcggaggcacagcttgacggccttccttaccccgtccgggttgtgttccgcgtcggggtggtcgatgattatatcgtccagggactgcccgtggaacaggagcacgtctagttctccgtggatccgcacgagtgcgggattggaaggcaggtggacgccgtcgagctcggtgagtggttgagccggatccgaggagctgaggctcggctgtgggagcgcttgtcggagggcatcgtggttccccggtatcacgatcacctcgacccagtccggcaggagttctaggtactccgcgaaccgctgatattgctcgtctatatcggcgatctcgagctcctcgcgctgacccgggtatatcccgattccgtcgacaacatctccggtcactatgacgtacttcacgcggctcgccactgggtcgttcgggtcgttcaaccactccaagaacctgcggaagagatcctccctgaacttcttcgatccgatgtgcacgtctccgatgaagacggccttcacgtcgtcctccacggccggaactcggctcttgtggtctccctcacccggtaacgtcacctcaccgtaccggtcgccgacgaacatcacggggccgcgctcgactttgacgaaccccttgacgccgatcaccatcccgggggcgacgtcgcgcctgaccttctccgagattttcggggctttaggtttcgagatcaccacccggacctttcccgcctcatcctccaagtcgaggaggaacgcgcgctccgtctctcggaggcccgtcaccactccggcgacgcagtaattcccgggttcacggcgcgcccgctccacgagctctccgatgtccttcacccattctccgtcgagcttggctttaacgagtggtcggagtttctcgagacgatctcggaagtgcgccacgaatccctccacactaccattcgcggacacggaacgtgcctcttcgaggatttccacctccgcgtcgacctcggcggcagggggcaacttggagggacgctccgcccgcgggcgcgcctcatgttcctcttcactttcttccgcttcgagtatctcgtaaacgtccccttccatcccctcgaggaagtccggatccacctctcctcggatcagctgagcggtgaacacgggaagatccacctcatccgatttctcaagtacctcgggggcgtcatcttcatcctccagctctcggagcgcttcgggtgttaagagtacgccgtactcttccgcgactttgcgcgccagttgtttagtctcctcacctttcacggaactccccccgaaacgggattaagacgggggccggcgtggccgttcgggggccgtcccgggttgcggccagtagtatggacggtgcggatagcggccgccgcgatcatcctcgtagcgatgacggcttccgggttccttttcgccgtgtcgctgaccgggaagtccccggtcgatcctcagttagttatgagaatgtcctccgacctggcacgaggtgactacgatgcgttcaaccgtgatttcgcaatggcgtatctacagctaacgtctaggctccatgaaggtttacaaacgttactagagtacctcggaattaaggctaaattcataaaggaagaggtcaagaagaaactatttaggtatagagttagggttgttaactcggaagatgtttgcactaaattgacggaactagcgcatgttgatgatattgctaaaggtaagttaatggtatatgcagatacgaaatccgaaccgaataagggtacaaaagtactaataaaggccattggatatgtggaaaaagtgaagattaaaggcgaaactataattatatattcgacaccctactacattgaagccgagggaatgggtatttacaatggggataaagaggttattatcgatgtgaacaccatcaagcttcggcaggtgaggagattatgaaggtaccttccagctcacttgcgggattgaggagaaccgtcgcagaactgtgtaaggaggtacatcgggccggtcttacgataggaggatcagggaacgttagcgtgcgctctggtcgctacgtagcggtatcgccctccgggttcagattatctgatgtgcgcccacggcacgtgccgatcgtcgacgtagagggtcgcgaggtcctggggaccacgaaacccacatcggaattgctcatgcacctatctctgtaccgagaagtcggtgatggggtcgtaattcacactcattcaccgtacttgacggcactggttcactccgggaaccgtccgccggagacagaggatcttcggagatccgtcggagaaatcgtgtgggtggaataccagccgcccggaagcgagcgtctagctgaagccgtggcgaaagtagcccgtaaacccatggtagccgcactggagcgtcatggcggtctcgtcgtcgcggatagacccgaagcggccttgagactcgcggaagccttagaggaggcggccaggctggccgtacttagacctcatccttaacttgttcgagggttgctatcacttgcaagagcacggtgcgggcgtattcgggggtgttttggtcgttcaccacttcctccagggtggagatggccgtgctggcccggacgccgggggactgtccctcttctttcaacgcctcgatcgcttgcttggccgcacggcgcacgttcctcgggatctggtcgtcttgaataatccgctgctccaacagggtgcaacactgttcgaacttctcttcgtagtccgacaagtcgccacccccctccgatgaggactgttgccgggcctccgacaccttgaaaaaaatctttcggaacgggggtttcgggggaccgttcctcatgcgttccggaataaaccgagacgtaatcgaggtactgatggacgtatacggcttgacagaacgacaggctacagtttcggtcatgagatcggaagggatgtcgtatcgggaaatagctgaggagctgggaattacggtgtcgggcgtaaggaaccacttagaacaggctcggatgaagatgaaagtagataatgacttccagatagctaggatcataggcaagcttgaaatgagtttaggaccggcgctagtcattgctatagttccggttgataagtcggaggatgttatcaacagactaattcaggaaggcgaaggagttacggaaatgactggacgtggtgggtacacaggtgaagaacagtctgttctgtttattattacagaggacgagaagaaggtacgtgagataattgaagaggaggttggacgagaggtcccgatgttcgtgatgagagcaccggcagcgttcccttcaccctgagggggaatcccgacatcaagaggtcagatctgaacaagatggcggaacgattgctcgcaggacacaaaatgttgggtatccattgccccgagtgtaaggtgccgctgttccaggacccgaaaacgggaaccgtgagctgcccaatctgcggaacggagttcgaggtggtagaggaggaggcgaagaaggtcaagagaaaagcgaaggagcgcaggaagcgggctgaaagtgaggagaagaagacgaagtgggcggaaaagaaaccggagagtggtaagaaggaacgaaaacctgagaaggaaaaacagaaacgtagaccgagactcccaggtagtgaggacgtacggaaggccgcccttcaagtggtcaccgccaggttgaagcgggccgccgagacgaaagatccggaacacgccttgcgggagctggaagttgccgagaaagcactcgagatcctcaaaaagctgtaagctggtattcgtgggggtggtgaaccgccagttctcggagctagcgatcgagttagagtttgaagtaggggccgttcagttctacgaccccgatgaccagccgggcgacgtcatatcgtacgtccgggaagggccgggtagattactgcccaggttcaggcccccggatgatcagtggctgattagggcgctcgaagaacttcagcccgatgtgatagtacccacctcggagttcgccgtcgaagcggcgtttcggacctccaagaagctcggcgcggaatacgcgggcaacgaacccgaggtagtgaacgtcgcggcggacaagttggagctgttcaacagactctccgacgtccttcccatgccagaaacctcggaagatccctcggagctcggcgtcgagaccttagtcgagaagcccgtacggggagccggcggcttaggagttcggaaggtgaaactcgacgaagccgacccacgtccgggcgtgatctttcaggagttcgtaccgggtcgtcacgtcagcgtgacgttcgtctccgacgggtcggatgtcagggtactatcggtcaacgaccagctgatcgacctgcgatccgagtactcctacaaggggaacctcgtgccgtctccgtaccacctagtgccgagcgtgagggaggaggcgcggagggtctgtgaggtattagtggacgagctgggcttggtcggtttgaacggtgtcgatgccgtgctcaacaaatacggactccacgtcatagaggtcaaccctcgaccgaccgcggttacggagtgtttggcacgggtatcaggggacaacccaatccgccttcacctgcaagccttcgatggtagcttgccggaacgatggaagatacgaggttggtcgtgcaagagggttgtatacgccccgaacacggtgcgcgtgccttatctctcatggacccgggacaggccgcgccccggtacggtaatccctcggggtgaaccggtgtgttcagtcatcgcctcctcgagcacgccttccggggccagatcgatggcgaagcgtttggaacgggtggtggtgaaccgcttagagcgtgtgtcgtcgacgccacccacggaggggtggtactgagcgacgaactgcacggaatagggcacgaggtcgtactcgtcgatatctacgggacgtgcgatgaggcccgtccttacccgatcctccgtcgggccttcggaaggttcgacttcatcgccgttccagttcactgtggcgtggatttcggaaccgtggaaggcccacgggtgactcatcacgcactcgccggagccctcgcggctcggtataagcaggatttcctcttcgaggttaccggagtaagagggaagacgacgaccgcgacttacctcgcgtggatactggaagaggcgggacaccggccggccctgtcgaccacggacgagtccccagtaggtcggccttcggtcacgcccgcccgcgtcgtcgaagtagtacgcgagacgagcggaccttacgtttgtgaggtttcgttgggggttacctcggcggcggactacgcggtgttcacaggggccccttacgactacccgatagccggcggatcgtcgtccgcactccgcgcgaagaagaagacgttactggaatcgggcgccgaggtaatgatcgagtaccgtgaagcggtgaagctttcgctggtgggtcctaaggtgcatcgggtccacacttccgacgggaccgtgaaatgtgacgacatctgtgtcgagttcgaagctttcgacatcccgttccacgaccgctgcttcgggctcgcggccgcgaccgccttaacctccggcctggcggaccgtgaggacgtagaggcggctcgggctcggggacccgtcccctcccgccttgaactcaggaggaacgagctcgtcgacgcacattcggcggtgaacgagcagaccgtacggtacgcgctgagcgtggcttcggatttgtggggtaggtacggggcggtgatcggaggcacgttaggcggttactgtgagggagtcgatccggaagccgtggcggaggtcctgcaggaacgtatcgagagaggcgagttagtagcactgaaactgaaaggagaactcggacgggaagtcgagcggcaccttgaaaacgtcgatctaccggaacccggaccggatactcccatcgtcaggatcgtccgcaaaggtgattagactgaaggcggacgcggcgcgggggttcgtccgttggcggaggttcagagggagttcgttatgatcaagccggacggcgtggtcaggggtctggtcggagaggtgatccgacgtctcgagcgcaagggtctcaagatagtcgcgctggagatgcgtcagctcgaccgcgagacggcggagaagctctacgaagaacaccgagacaagccattcttcgaggatctcatcgagtacgtgacatccggccccgtcgtggtgatgatagtcgaaggccggaaggccgtgaaggtcgtgaggaacattatcggcgcgacggatcccgccgaagctgcaccgggtacggtccgcggagatttcgcgctggatatcggcaggaacgtggtacacgcctccgactctccggagtccgccgagcgggagatcgagatagtgttcggcaaggacctatccacgatagattacgaacgatgcgacgaggagtggctgtacgaatcataggagcttctcgagctctagaaggaactcctccagccgatcttcggggacttcggcacccgcagccctctcgtgtccccctccttctccatccacgcgatcagccgcctctttgatcacttcggcggcatccacatccgagttctccggacaacgtatcgacaccttcacgagaccctcttccatttcagccacacctacggtcacacgctcccgctcctcacacacgaactgggctacgattcccactacggtgtgcgggatcccgagctcgcgaccgtcgatcactaccatgctctctcggtccgtgataccttctccgcgactcagcctactcaatgcttcccggatgatggccttgtgcttgctcctgagcttcttggccagctggaggggatcccaagaccccatggcgatcaggacacccgcccacccctccccgtatctgccgcaggcgttgaggagcgtagccgtctctaagggatctcgaagggccttgagaggacgctcctcgtcgaacacgtggatgcgacccgtcttggactcgagctccttcctcttctcaccgctcaaaagttctcgatgttctcgaactatttcggcttcatcttctcgactcaaatccacgggggccacgtctagatcgccgaatctggcctctaacgcctcccgcaccgaagcgccggaaacgcgctccacgatctcccctacggtcatcgacgcgcgtccgaacacccagtaggctgggtctcggatctcgatgatttcgtgcttctccccgtcctcctccggcaccctgttcaagcctcgaactcctctcttaccggcttgattgtcaccgtaggcgccgaccagcgcggctttcggcagacacgtctcttcgactttaaccacgcgtcggcacagcaagtacgctactgtggaagccgaagcttccgtaccaccgtcgacaccgtgctctcgtgggttcaccagaagtacgttgtccgaaggtttcgacgaaatctcgtggtggtcgatgacgagcacggggtggtcgttccgtagcttgtccaggatcccgctccccatatccacgaccacggtagggccgtcaagatcctcctttaacagctccgtttccgtgttcagtacccgaagccgtgtgggtacctcgaggcaccggagcgtgaaggccatcagtgcccctgccgtgagcccgtccgcgtcgttgtgaacgtagaggcggacggcagttccctccagatcttccaggaactcgacagcttcttccagagtaccttcgaacccgtcatcgctcaaggtaccgccccgcttcacccccagctgggcatctaccgagttgtagccatcgggcgatcgaacgttaatagaatcgtaacaattgggcgaggcgagagctcattccacgtggagggcctccgggtcgtacttccagtcctctggtaggactcccttccgcttgtagtacttaaccaacctatgaatcttggactcgatgagctggagtccccgcttcgagtgcaagtcctttggatgtcgcttcaagtgctcgcgcactcgcttggctctgcgaatcaagttcagcaggtcctccggaagttccggggccagcccgtgctcctcgaggatctcagtgattttcttaccggtaattaatttgacgtcgggtataccgtactcgtcacgcagcttgatacctatcatggcgggttcgtaaccctgtttggccaggtcgaccaccagactctccacttcctcgggcgagtactccacccacgacgggggagctactctggggggtctggttgatcctgacttgcctctgtcacgtgaatgcatacgcgccaagactgatcacctccccgccacgttattcttgtaccactccgcgaacctctcgagcgccttggtccggtgcgatattttacacttttcctcgactcccagctccgcgaacgtactgtcttcaccctccgggatgaagataggatcgtagccgaagccctcttcacctcggggttcctccgctatccgcccgcggatctcgccggtgaaggttaccggtcgaccgccgggctcgcagtagcctacgaccgagatgaattcggccttgcggttctcctccccctccaacaacttcaagataccctcgttaccgatcgtgtcgaacacgtaggcggagtacggccctgggaacccgttcaaagcttcgataaacaggcccgagtcttcgactatcaccggctgacccaacgactcagcacagtaccgggccccgtaggcggcgatctcctctaagctgtcagattgaagctccgggtagtcgaggtcaacgcgctcgacttcgatgccgtaccgcgctaatatctgcttggcctcatggtactttccgatattgcccgttgcaaataacactttcatattccatccacccaaggtttaaattcgagtaaaatggcgtttcgacgaaaaatctcaagggagtgatataagttgtccgagagtaataaagccatacgacaaccgataatttcggtacttgggcacgttgaccatgggaagaccaccctcctagataagatccgcggtaccgccgtagcggcgaaggaggccgggggtatcacccagcacatcggggcttcggagatcccactggaagttgtcaaagagatctgtggaccgttgctcgaacagctggatgtggagatcacgatacccggactattgtttatcgataccccgggtcatgaagctttcactaaccttcgaaggcgtggaggagcactagccgacatagcgatcctagtgatcgacatcatggaaggcgtgatgccacagactgaagaggcccttaggatactcaggaggtaccgcaccccgttcgtcgtcgccgccaacaaggtggacagggtgccgggctggaagtcccacgaggacactcctttcctcgagtcgttccagaagcagtccccggaggtacagcagcggctggaagaaaaagtctacgagctcatcggacagctccaccagcatgggttccaggcggaacgcttcgatagggtgagggacttcacgagaacagtcgcgatagttcccacgagcggggtcacaggggaagggattccggagctgctgatggtcgtgaccggactggcacagcgcttcctggaagagcagctgaaaatagaggtggaaggtcccggaaaggccgcgatcctggaggtcaaggaggaaccgggactcggccacacggtcgacgcaatcctctacgacggtatcatccgaacgggcgacacgatagtcatcggtcatccagaagagccgatcgtcacccgggtgagatccctgctgaagccgaagcctctggacgagatgcgcgacccgagcgaccgattccgtaaggtggatgaggtgacggccgccgccggtgtgaagatcagtgccccggagctcgaggaggccgtggccggcgccccgttacgcgttgtcggggaagacgaggacgtcgaggaagtcgtgcgcgaggtccaagaggaggtcgaggaggtcaccatcgagaccgaccaagagggaatcatcatcaaggccgacaccctgggaaccctggaggccgtcgtcggggagttcaaggaaaaggacgttccgatccgcaaggccgacgtcggagacatcaccaagaaggacgtcatcgaggcgcacgcggtcgcggagaaggatccgctactcggcgtgatcgtagggttcaacgtaggggtcaccgaagaggcgcgggagctggccgacgagtacgacgtcgacatcatcatcgacgacgtgatctacgagctagtcgagaagtacgaggagatggtcgaaaagcggatcgagcgagagcggcgcaagcgcctggacgaactcgtacgtcccgggaagataaaggtgctccccgggtacatcttccgccagagtaagccggcgatcgtcggcgttcaggtcttggcgggtgtgatcaagcccgggtatccactgatgcgagaggatggtagggaactcggggagatcaagcagatccagatgcacggtgaaccgattaaagaggcgaagaagggacaggaagtggccatatccatcgagggtcccatcgtcggtagacacttcgaggagggcgatatcctgtatacggacgtaccttccgagcacgcgaagctcatgttcgaggagttcaaggatctcctgacggaggacgagttggaggcccttaaagagatagccgagatcaaacgcaaggaagacccgttctacgggatgtaacctcgataccgccgatgacgacaaacctgggctcggatcccgtgaagagccgtgtcctagccgaggcggcgtcgcggcactatcgccgggagaacgggtactgtgacgttcgccgaacccgaggccggagtccgcgactgaccacgacgcagcgcacccgtcaaccgcaggaaggccagggccgcgtggtacgccctctcaacgcccgacggacccgcatcacgtggcacctctagagtgatcacgtcaattccgaaccggcgcgccacggatcttatcgagcccctcggggcgctctttactaagggcacgaatcctgaggacctcgccagctcgtccacgaattcactctcctcatcggttaaaagcgctccctggcgaggtaccccactaccgcagtgcatatccaaccagtacttcaccctatgggagagcgcgaaccgcacgagatgccacgtcagggatccgggtatatccgctgtccggttaggatctacgccgtcgactaacctcgagttggccgccagccccgccgggttgacggcggggatcacgtatacagtacctattacggaagtcggactcagcgcgtccaacaacttcaacaacgctatcactgtccacacctcgtcgccgtggacaccggcggtcaaaagcacggccggtccgggacctccccggaactcgaagaccacggtgccttcgacggagtgtctgtaaaccacctccgagcgtgggccgtggggcgcgtgctggactaaaacggggttcttcagtatgttacccttggaaccccaatcgtacaccgtccacaccgcctcacaacatccggacgtcgggagcgctagcaggactaacagaaccgcgatcaaccctccgtcacctcagtaacggcaagtcgcccgtaactcggtcgatctcctcctcgcgctcgggtccgattccgagacaagttaccgttccgggctctaactccgtgagccccgcgtctcggaccaaaaacgacggtaagcccctcctcttagccagctcgtggagctccaggagttcctccttgtccttacacttgagcactaccttcttctgaccttctcttaaccactcctccaccggcgccccggactctttggcgcgtagaaaggctcccagtgatgcgtgcgccacctgggccgcgagcttcccacgactgagtttcaggtctcctctaaccacgatcacctgtttgtacaaggtgaaccccctcggctgagaggagtctcgtcacagactcggcccgtcagctcctcttcattggggcccgtaagacaccggcgaaactttatttatttcaaccgagcgtcggacgccggacgaggagatcgaccacgaggatgaggatgaaccgatgagtggggtgatggttaatgtccaagcccatgtacgtgaagttcgaggtcccggaggagctggccgagaaggcctacgaggccctcgagatcgctcgggacaccggtcgtatccgtaagggcaccaacgagaccaccaaggccgtcgagcgcgaggaagccgtactcgtgctgatcgctgaagacgtggaccccgaggaagtcgtcgctcacctaccggagctctgcgatgagaagggcattccgtacgtgtacgtcccgagcaaggacgagctgggtgccgccgccggcatcgacgtagccgcagccagcgcgtgcatcatcgatcccggagacgccaaggacctcgtggacgagatcattgagaaggtcgaggagctacgtgagtaagctgatccttttccccgcagcccctatcgttacagttatcgtaacgaattctgtactcagttaggtggctctcgccgttgcgcccgacggtatcttggtacccccgaacatttgtgcgactggcaattcggagtaagccgatgaaggagggactgaaatctgaagtcgcgcggaccgcgtccccacgttaccattacgtttccgatccaccacacgctaccggggatgcgctagggttctctaacgatcgttgtacggtgtacggtctcgagacggtgatacgataaccatccctatccagacatttgagaactcctcgatgcgaccctgcacggatagtacggcggtacagcacggaccggaccgtcatatagccgcctctcactagaccgtgcaccaccgtgcgggtaagcacgctgtcctaagggggtcgtcgccgtggtgggagtgattccgctgaaagttctcgcgctcctggtgctggcgtggctagcgtacgcgtttctaggtttcgtgaaattctacgcgacgacgggttgcctgccgttaggacgactggccttcgtgaaattacatgatccggacataagaccgggaggtcttcacgagatggtcgccaccaacgtcgcgcacaccctcggatactcagcggtcacgatcgtccataacgcgggtaatgagcgcatgtacggctcgtggaccgagaagaacggcgtactcgtgtggaacatcgcggcgctagaccctcgtgggaaccgagcgtcggtggactggcacggtgcgctcagggagctggtcttcgcggacaggttgaggactgccacctgggttcacgatgggccgatcggcgggccacgattccccaagaactccgtgatcttctggcacgggaccgtgaggaacggtttcccgctcctctacggagggtgtgggtgcgagccgtactactacatcctcgcgaactatgggaacgtccctttcgcgatcacggcaactgtgctagggtggttcacaccgttcctgatatcaccgctggaagctttttgggagctctcgcactacaagagactccagtacgagtacctgaagaaggtgaacgggatcaggctgataaacctgaaaaactatgaggggacgtcggcgacgcctactgattcgatatcgggtaattcggtgcctcgtccgtgatggcgatgtcgtgtgggtgactctcctcgtacccggctcgagtgatccgtacgaacctcgccttcttcttcatttcctcaatgttcttggcgccgacgtatcccatgctggatctgagtccacccacgagggtgtagaggacctcgctcaccggacctttgtacggaacgactccctcgactccctccggtacgaacttcgtttgggcgacgtggcggcctccctgttcgggttgcttgaagtagcggtcggccgattcacccttcatcatggctcccaggcttcccataccacggtactgcttgtacagacgtccgcgtaaccggatcacccggcctggagcctcgtccgtgcctgccaacaggttacccagcatcacggcatcggcgcccgcggcgatcgccttggcgatgtctccggagtacctgataccaccgtccgcgatgacggggatgtcatgttcctccgcgacatcggccacccaggctacggcggtgatctgaggtacgccgacaccggcgacgatcctcgtagtgcatatggaacccggaccgataccgaccttcagagcgtcggcacccgcggcgatgaggtcctccgcagcttcggccgtggcgatgttgccggcgatgatgtccgcgtcgacctcacgcttgatctccttcacgaagttgatgaccgtctccgtatgcgcgtgggcgcagtcgactacgaggatgtccgcgccggcctcgtccagggcgatcgctcggtcgggatccttcggacccacggctgcggccgcgaggtatcgtctctcctcgtcggtggccgcttccgtctcctcacggagctccgttacgtccttggcggtcacgatccctaagaggcgaccttcgtcgtctactacgggcacgcgttcgatcttctcctccctcatcacccgtagagctctttcctcgaggtcttcaccctcctcaatgacgaccggctcttccgtcatcacgctcttcacgtccaactctccgatctcttcctcggaaagcaggcccacgtcgcgccgcgtgatgatgccgacgaccttaccctcttcgtcgacgacaggcagacctccgacgtcatgcttctccatcagctctacggctcgcttcacactctcgtccggtgaaatcgtcacgacatcacgttgcactacatccctggcctccttgacgcgcctgacctccttcacctgctcctccacggtcatgtttctgtggattacaccgaggccgccgtgtcgggccatcgcgatagccatctcggcttcggtgacagtatccatggcagcactcaggatcggtatgttgatccggtagttgacggtgactcgtgtggatacgtccacatcggcgggttctaccgaggatcgttcggggagtaggaggacgtcgtcgaacgtgagtgccagctcggcatcctccagctttcgagtgtaccgcccgaccaagcccccgttccccgcgccttttgcggggaacggaggcggggggagttaaaggttgtgcgagggcggttactcggactcctccgtctcctccgtttcagacgccttgcgctccagttcctcgacccgttcggccaggttttccgccagctcttctagcttgtctcggaacacctcgtagaaccctgtagcggccttgatcagaagtagtccaccgaagccgataccgaccagcagtacgaggagactcagtacggctccggctcctggtacggagaccatcagcggggacagtaggacggccactacgaggactattgccgccagtaccaggttgtacgtggctgtacggagatcctcctctcgacggcccagcagtaccatcgatacgagatcggcggcaggagtgatcatcggtttcacgtgctttagcacgccgtaagcgaagtatagtgccagtaccacacccacggcggtgagcaccatgttcactggcacgccgataccgggtatcatcgtcccgagcgacgccagtgggggcaccaccagctggattaccaatatcacaacgatcaggccgatcgcgttgagtgtggccgaaactaggtgctcacggacggcatccgcgagttcacccaactccttccacccctaagggtacggggcctgaaagataataaatgggtcgatttcaggcgagcgcctcggccagtttccggactaggtggctgcggatcgccccacggttacgatcaccgcgctcacaggctgctccccgaacccccactatgtccgctccgaggtcgcgtacgatgggcatgtcttcgtgccgcagggacccggcgagcgccacttcgagtccgtgctcgtgagctgaatcgacgaactctcctacctcttcctcgctcaagaagtcgaacaatcgcttaccgtcctttaccgccgtgtccaccatcgccacatcgcactcagcttcggctgctacctccgggacggacatggggtctaggctcccgactcgatgggcgtccgcgtagccggccgcaactacgcgcgtgtcgtacccgaactcacgaaccgctcgggagcaagcccgcatgacttccagcgcttcttcttcggtcttggttccgtagagccctaccttcgcgtagtccacgcccacggcggctacaccgagcacggcctgagccaccgtacccggcttgtagggaacgtccccgacggtggcgctgacctcgcggtcctccgggactacttccatgatctcacgtatcacccatgggaagttcgcacctagggatccttcctcggggttcttcacgtcgatgatgtgggctccaccttccacggcctctagcgcctcatcacggtttacaggactcacaaggagcctcggtcgcatggtcacaccccagcaacttcggaaccggtttaccgtaaatagctcctttgggaggggtgttggcgccgcgttcaaggtagccggggtcggttaccgtgaggtcgctctccgtgctcataacagcactgacgatacccctaggagtcgcggggcagatcatgacgcccgaagaagtatccgaactgccgtacaaccacccggtgatcgtggacgtcgtagccggaccgccggaagccgattcgatcgaggcgtacacccggatcgtatggatggacccgataacccatgagcgtcatatcgaggaagaagtcgaggtgagaacatcaaacacgctactgctcaacgtggtcgtcgcctcccctcaccgcccggccacttgcacactcatggtgtccttcgacgaccggagggtcttggagcgtacggtgcggttgcaggctaacgggatagttcaggaatccctggagctcgatgtcacgtccggtcgtcatacgctgtccgtcgaggtgacggatgggggcaccgaggatatcgtttcctgcaacctccgtgtggaaccgtcggaggggaacggaggcgagaataaccaggttcatccctttcaggggctcgtgctatggcctcgtcgtcgaaggagacgatggtaatcatagccgaaaagcccagtctcgcgggaacgatcgcggggttccttcgggggagctgggacggtaggaagctgctggggttcggtagataccgaggtagacggttcgccatcaccagcctgtcgggccacgtcctggagtggtggcctaaagacgatccggggttcaggcaccctgattacttccccgacccgggcgacttcgagttgaggcctatcgacggtaaagaaaggttcctgcgggccgtggaacgtgtcgtgaagcgctatgccggctgtcgagccgacagggtcatcgtagcgaccgacaacgacgcggagggagagctgatcggttgggaagtacttgtatggttgaaacgacagggtggcctcgacgatcccgagtgcgctcggcggatgcggttctcggcgtacacccgcgaggacgtcctcagggcgctcgagggggcactccgtggtgagaggatcgacccgagcctggcttactcagcgctcgcacgcacgatcgcggactggctgtacgggataccgctcacccgtcggctgtcgctctgcaacgacgacatagtctccgtcggtcgagtacagacgcccacactcaaactggtcgtggagcgggagcgggaacgcaggaaggctcagaagaagcgcagatattactggatactccaagccgagaccccgatcggggaacttagaactgaagagaagttcaaagatggacgtcgggcgagggagctcgcctccgaaatcgaatcgataagggtcgtggaagtgcggcgggagcgccggtccgtaagaccacctactccgttcaacctgactacccttcaacgggccgccggtaagatcctccggatatcgccgaagcgcaccctcgatttggctcagcgcctctacgaggaagggatgatcacgtacccgagaaccgcgactaaccggtacccatccacgttcgaccacgaagaacttctccgcaagctgaggaacgctcaccccgatgccctccgggatttccagcgcactggtcgaaggtcagagcccgtctccggtaaggagtacgacggcgcccatcccccgatcacccccaccggtcggcggaagtacatccgcgggaaactggcctggcgcctgtacgatctgatcgtccgtcgatatctggcgacactgtccgaggacgccctggtagtgaagtggcggatcgtagccgagcatccagggaccgggacgaggttcgtgatggaaggcacggaagtcgagcgggacgggtggtactcggtgtacccgtgggagaagccccgggaaagtaccatgcccgacgtgtccgagggagacgagctaccggcgaatgtaaacgcttcccgccgtaggaaacccctccctcgtcggtactcgcagtcgcggttggtggcgaaaatgaagaagcttggattgggtaccgagtccacacgggcggagatcgtgaagaaactctttgacaggggttacgtcaagagggcagggtcgggcgtggcccctacgaagagaggggagcgtctggtagagctgctcgaggatcgggttccggagctcgtgagcgtcgaactcaccaggcgcattgagcgcgagatggaggagatctcggagttaccgccgaagcgagccagggaacgattggaacgcgtagcccgggagatccgcgagaccgtgcgcaggaactccaagaagttgaagtcagccaaggtggtctgactcctactccgacctcgcccttgtcaccaccgaaacaacactcacatgaaccgacgcttgaccttgagctctcacattctgggcacgttgtgatagcgtgatgacagtatcttattcacacctacaacggtgctcgtaccttaacctcatctattcaatccggcaataatgtgactataagccacattgtagctactttcaccgattcaacttagcctcgcagctcctcattggcccgatcttgaactttagcatatccgttaatagtcactatcaccgccgagaatcatctgatcacttgatcggtcgaacgatgtatgaggctcggggacgatttcaaagatcactgaccttcatcactcgcaaaatcactcgagatccgaaggcaaaaacaccctatctccacttaaaagtgaggcttctcaaggggttgtgggcacatgacctcgacggaaaaggccaggatccgaaggatggtgtgggaagagctcgaggagtccggcgaggccgcgcccccgttccccgtcgagggcaggatcccgaacttcaagggcgccttagtagcggctcgacggctcacttcgacgcccgaatacgaggaagccgaagtggtgaaggtaaatccggactcaccccaacgacctgtacgtgaacgagcgcttcgcgacggtaagatcctgataatgccgacaccgaggctcaaacgtggcttcctcgtcgtgaagaaccctaaagatcctcgacgtgcctcaacgattaggggagctttccaggaaggggagctaacgatgccggacgaactccccgcggtcgacttggtagtggccggatccgtggcggtagctccggacggtgccagggttggaaaaggtggcggctacttcgacttggagtgggggattttggcgcaattggatctcgtagatgaagacactcccatacacactaccgttcacgatatccaggtacttccaccgggagagataccgatggaagagcacgacgtaccggtagacgtcatccacacgccgacggggacgacggagtgcgttcgacgctacgagaagcccgggggtctcttggaagaccgcatcgacgagaaaattagggagataaggtggttgcgggagtacgtttcagccggaagcacgtaacgcgtcggcaagttcggccaaggccttctcgagttcgtcctctccgatcacgagcggaggtactagtctgatcacgtcaccagaggttacgttcacgagagctccacggtccagcatctcccgagccacgtctttcgctctttcgtcgtcgccgacctccactcccatcatcagaccgcgacctcggacctcttccacgacgtcctccgcctcggacagtattctcatcgctagcttccctttccgctccgcggcctccggaaggttctcctcgagtactgtgctgaccgccgcacataccgctgcgcaggccagcggattaccaccgaaagtggacccatgatcaccgggctcgaacgcttcggccacctcctcccgcgctatcgtcgcgcctactggcacaccgcctccgagccccttggccagacagacgatgtccggcaggacgtcctcgtgttcgaacgcgaagaactggccggttcgtcccatgccggactgcacctcatcgacgatcaggagcagcccgtgttcgtcgcatagctcccgtagctctcggaggaatccctctggcggtatcctcactcccgcctcaccttgcacgggttccacgatgacggcggcggtatcgtcgtcgatagctttctccacagcattcacgtcgccgtaaggtacgtgctcgaactccggtactagcggctcgaacggctcacggaattcgggcttccaggtggccgatagagcccccatcgttctgccgtggaaaccgccttcgaacgcgatgaacttggtgcagccggtaaacttgcgtgccagctttatcgcacactccacactctccgttccggagttacagaagaagaccttgttcaagtccttgggagccgcttcagccaaaagccttgcagcctccgcctgcggctcgttgtagtagaggttcgagcagtggatgagccgctctacctgctccttaaccgcctcgaccacggccgggtgacagtgtccgaggacgttgacggctattcccgcaactaggtcgatgtactcgttcccctcgtcgtcccagaccctagcaccctcaccggggaccagggtaaccgggaacctcgaatacgtgttcatgtggtacttatcaatgagctcacgtgcgtccagcggtcaccccccctcgggcaataatcctagctttttgagttccctccgaagcaactccttggtgtcttcgcgagcttccttaagtggtggtctagggggactcgaggccattcccacgagctcgacggcggctttcacgggtatcgggttcgtctcggtgaacagcgcccggtgtagtggtaagagctcgtaatggagctctcgggcacgctctacgtcgccactcttccacgcctcgtacatttctaccatcaactcgggagctacgttggccgttacggatatcacgccgacgcctccgacggcgaggatcggaagcgtcaactcatcgactccggagagtaggatgaagtcgtcaggagtctcttcgatgaagcgttggaccacgtccaggtcgccactagcctctttgacgccgacgatgtgagaatattcctccgcgagcttggcggccgtctccggttccaacgcacagcccgttcgtgacggcacgttgtagaggataatagggcactcgacggcttccgcgatcttagagaagtggatgaaaagaccctcttgaggtggcttgttgtagtagggaaccacggaaaggatcgcgtctgcccctacgtcttcagcgtacgtggagagctcgagggcctcgcgcgtcgagttcgaacccgctccggcgattacgggcaccttcccgttcacctcgtcaacgacgatctcgatgacgcgtcgatgttctgcgtgactcagcgtggacgattccccggtggtccctgcgggcaccacgccgtgcacgccggcctcgagcaatcgtgagacgttctcgcggagtccctcttcattgatccctttcaggtcgtccgtaaagggagtgatcagggctgggatgacgccctcaatctgaaatcccaacgggtacgcccctcccggtcactctgtcccttcttccctctgacgctccttgagacgcatgaggtgcgtgacgtaaccggcgatcatgttcctgagctttttggtcttgggtctcgcgacgatctcaactactttcttgttgtgctcgaagtcggtggtgaggtactcctcgtacttctccacgatctcacgggccggacgcttcacgaacgtcggtcgaaccttacccatccccgatcaccccccgctggacttctttgctaacctttaggatagaagccagcacgatgtccgcgagcgccggatccagcccctctgttttaaacctcttcctccacctctcccggagctccttctcccgctcctcgtccgtcagtggtaacccctcctgagcctttacgcgccctatttcccgcgccaccttcaggcgctcgatgactgcgtccagcaaacactcatcgatgcggtctatttcgcgcctgagctcctcgagcacgttcaggccccacggttctcgtttccagtacctcacctctatcggaccaaacttcggatacctctctaacgtccgacttcgtctcgcagagggcgacgaacgccggcccggttcccgaaagccccgccgccgcagcacctgcttctaaagcttcgaccacgggttcgaattcgtgacccagggcggagcagtacaccgccgagttgatcagcattgctccccggtaatcccccgtcatcgccctccggaaagcagtctcggcggcaggagctaacaactcgagacggttcacatccacctccgaggtttcgaccttacctcccgggagcaggatcaccgcataggggtacggaagctcgcggatatccagcactcggtgctgatcgttcagcgtcagcactaagccacctaagtacgatgcacaggcgtcgtcgtaggcccctgttaccgtcacaccagccctgatgctggcctcgacgccgagtcggacgacctcgaagggttccggctcacgtcctagctctttgagcagggcttcgaccacggcgttggacacggcactgctgctggccagccccatcgcaatcgggatttcggagtcgacctcgatctcgaagttcagttcctgaccgacgtgttcgccgacgacctccacgcaccgttcaacgagtgacgtgtcctccacgtccgtgtgaatctccgtggaatcggaaagttccgctctgactgaaactgttagatctaacgcgtaggcacaaccttttttggcagagatagcgttgacaacggtaccggcggcgtacgctattccctcccccaaacgtcttcaccccggaaaacgctgatcagagcccgagcgcgggcccgccccggttcggcaggcggcggtgaggtgggggttatccgccgatgaaccgccgttcaacggccggggtacacgggcgatgagccccgtggcccgaccgggcggaggcgggctcggttcccggcgatgacgccccggtcccgtcgggcggggcacagtcactccagtctctccatcacaaaccgacactcttcctcatcgatgtcgatgctcgcggttctcatcctgactccgaaggtctcctcggtcgcttttagcaccagggaggcgaaggggcacaccaccgggaccttgtcacgctttaagagttcccgcttcacatccgaaaacggacactcgacgatcctcagctcaacagtattcttcttttcttccgctagaacatcaccgatatcaccaagcgattctatggttttcttcacgtcatgtgctaatgaattagccgtatctccagttatttccaatagttcctcgtcttttatgtatttcatcattgctctacctgcaattctatttagcgccaatgccatttcaccgtgagtctcgaatagggcctcttgaaggcctacgataaacgctttgtatactcgctctttcgacaactgtctacccccttagtacgttccgaattacccttccgagctctccgccgatgcgtgggatcctcccgctctggatgtcctcgatcacgtccttcatcatgcggtagtggttcaggagctcgattacgtcgcgctctgacgtacccgaaccgatggcgatgcgccggattcgtgacttgttgagaatttcaggattttccaactccttctccgtcatcgagtccataatgaccttgtacttcttcaggcgctcctcggtgatctgggagatcttccgaacgttccttccgcctcccataccgggcacgtactgcaggagcttgtcgacgggtcccatcttactcagtgcctctagctgctcgtagaggtccttgagggtgaactctccttccaggacgtcctctgccttttcctcctcttccagcatctcttcggtccgacgcaggagctcgtcgatgtctccgatgcccaggagcctcgcgacgaagctcctcgggttgaattcttccaggtcatccacgcgttctccggtaccgacgaacttgatcggagctccggtccgtgccaccgcggagagcgctccaccgcctttcgccgcggtgtccaacttggtgatgaccacacccgtgagctgaaccgcctcgtggaacgcctccgcgtgatctcccgccttctgccctaccgtggcgtccaggaccaagagtacctcgtgcggctcgatacgttccgccatctcccgaagctcgtcgatgaggtcctcgctcaggcggtccctacccgccgtgtccacgatcacgacatcacactcgtccttgagtgcctccacacctttgacggccatctcgacggcgtcatcaacgtcctccacgtggactgggacatctacctcttcggccagttgacgcagctgctcacccgccgcgggacgatacgggtccgcaccgacgagcccgacacggtatcccttccgctggaggtatctggccagtttcgcggccgtggtggttttacccataccgtacagtccgacgagcatgatgacgttcacgtcgcgggagaggtcgatgtcgaggccttccgtcttctcacctccaagaagctccacgagctcctcgtacactatccgcagtaggtagtcacgtttcggcactcccgcgggtggttcctcctcgagggctcgcttttcaatgcgcttgctcagttctagcacgagctttacgtcgacgtccgcctccagaagcgcacgttgaacgtcgcgtaccacctccttaacgaaatcctcatcgattatcgaggctcctttgatcttcttggtgatttcagcaagcctatcggcgaatcctatcacgattcttcccccccaattacgcgctcgacgaaccattccggcgagaacgcctttaagtcgtcgtaatcctgaccgacacccagatacaggatgggggctcccgtaactttcgatatagaaagtacggcaccacctttggcgtccgcgtcgactttagtcagtatcgcgcaatctattcccacgtattcgtggaatgtcttagcctgctcgatcgcgtcgtttccggccagtgcgtcgcctacgaatacgacgagatccggttccagaactcgcttcatctttttcagttcttccattaagttaacgtcggtgtacgcccgtccggcggtgtcgacgaggacgacgtccttccccttcgcttccgcgtgctgcacagcgttgaaggccaccgccgtcggatcgtctccccgctcacccttgatcagggtgacgccgagtctttccgcgtgctcctccaactgttcaatagcggccgcccggaacgtgtcggccgcggcgattacgaccgagtaaccgtgatccttgagcagtttcgcgaccttggcgatggtggtggtcttaccgctcccgttcacaccgacgaacatgatgatggccggtcgaccatcttgccgggccttctcaacggtctccatgagatcgacctctttcttcggctcgagtaccgataggagcgcttcgcggaagccctcctctacgaccttaggaatctccgatttacccttaacccgacggccgaccagctctttcttgagctcctcccggatgctctcggcgacttcaaccgcgacgtcgttgcttatgagttccagctccagctcgtcgaggatgtcctcgatgtcggcctctgtgatcgtaacctcacgcttgaccaccctcttcaggcgttccttcaacgtgggcttcttgaggtcctccggcatcgtttcgacttccttaacttttgcttcctcggcctcctctgcgcgctcctccacgcgcttcgccaccttctcctttaccttgcttagaacgctcttcatcttgccgaacaagctcgaaggcacccccgaaaaacgtcgggtttcgggaaggattaccctccaccggactgctgggcgatccgctgggcaccttcgagctgctgcgcaagttcttgtgccttcctctgcttctcctgcaactcctgagccagctcctggagcttctgctgtgcttccgcgcgggctttctctagctcctgccgctggtcgtcgatgctctcgagtgcttcatcgatcgttctctccacagccacgccggctccgatacccacgatcacgcgctccgtgtcggtgacacaagctctgacgaacgactgagcacccacgggtacgaggacttcctcgtcgccctccagctctttaacgcccttcaaggtctcctcgactcggttcagctcactgatcgaggactctatgaggtctatttgcgcgttgatcgcctccatttgcccttgaagtctgttgatctcggctatcagtcgctgtagttcctgttggatctcttgctcgttcttcttctccgccattactcttccacacccagaagccgcctcagtatcggatcctctaccttagaggggtctatctcccggatctcttcgatctgaatctccatgcggctgacgccgtgctcgctaccgagatcggagtacaccttctccagcgcttcctcttcggacgtggccggaacctgacgcgtgaacggttgtcgaggctcgtcacccatgcggaacgtaccacggacctcgaacaccttcacctcggacatcgggaatacccccggattcagatgaggtacagggcatcctccaaacgggcgagctcgggacccgtcgtatcctcaccgacaacagcacctttagagttcaccacgatacccacaccgacgtagggggatccgcggttcactgtgccgacctccacgtccacccctagcacctccgagacacgttccatttcctcctccgtcgctcctgggtgtaccacggcccccttagagttcgccacacccgctgaccctacggtcttcacaccaccgagctcaccacgtaccactctcccgccgaggactgactcgatcacctctaatgcgtgatcgtcgagatccggatgaaccagtgccccgtgatcgttagtgagaacgaggttgccgacggcgttcattttggaggggagcacgtcgacttccacgcccagctcacggacgacccgtatctcgtgctcccgagcgtgtctagggaacagggcgccgttggagttcacggccagtagggcgcctacgaggttgctgccggccacggtggtccgaacgacttcgacgtccaacgcttctttcactctttcaacgatgtcgtccgggactttgggagcgacgacggcgtattcctcggaggccgctatccacgccccgatgttggggtccccgtggaccgaggccttgactacggtcatgcttactccgccagcctgacttcgacggtaccgtccgcgtacttcacggcgcgaactctgatcttagagggtggcttcttgatgccccgctcccagatcttctcgttcacgtcgttgccgatcctgacctcctccgccttcatgtgtcgttcgatgaactgcctaagcgccttgacggccctcggtgcgcgcttcttgagcggtgccttcttcgcgtcgcgaagcggtacggtgtaaacacgctcgtcgacgacttcagccacgtcccaatacccccattacggcttcagcttgctacgcctccagtgcctacgcttcgggttgtcgatgacgcgtccacccgttttagccacaacccacggtgggacgcgacggttctgcttgatcgccttggccatacggagtttcttacccagtggtttcacacgggccaatcgactacccccctcacttccgtttgaaccttatccgatactcctttcgcgtagcgtccgagacctgtttcaggattctcttgagttgatcctcgtcgatcttctccttcaactgacccgtttgagccagctgtagtaggtaattttcaaccgcctgagccagctgtggcctggcgagccggactcgagccagacgttcccgggcttctggggtcaggatcctacgaagcatcgcccggcgctgggcttcctccagtgctttcttctccctctcttcctcgaccttcttctcctgcgactcctccagcttgcgttggagttccataatcttcttacgccggatgcgctcgagctcggggtcggtcatagtggcgacctcctacccccgatcggcggttagatgggagacgtgaatttatccgtgtatcccttctccttggcgatctcatgggcggttgagtcgacgagggacctgccttcaggtgtgaccactcggccttcttcggtcttctcgaccagtccggcctcctccaactgctgcaggatcttgcggatgatcgcaccacttcccttccggaaccgctcgggccgggctccccggtcctgacgacctccgtagtacgtgcgcagtcgggagactcccaccgggccgtccatgtacactcggcgcaggatcgatgccgctcgcatgtaccaccagtccggatcctccggcggacgctccttgtggcggcctgtcttgacgtacttcgcccactcgggcggtttgatctcctcgaagtccttgagcttctccgccagacgctccacgagctccgatccgggcaccacgtaggcatcgtacacggacctaacccccctccgccggccgcagagggcgcgttaatgggtttaacgggagagcccgtggaacctccgccatccttctctcggtcggaagagtactgccgtacgtccgcgtacgtcgatcagctccgcgttgaccttcctggcgagttcttcggccagctccttccggtcgtaccgacgtaggatgtttcgctcgaacctgaccttaatgagtccgcgctcctccagctgtcgatcgacttcctggatgactccggaagtcagtcctttcttccctatcctcacaacgggatccagcaggaccgcgcgggctcggagtgccctacgctccttaccgctcaggcgtttaacctgcgtcacgatccttcaccccctccatatgcctgcgtctccgctcctttacctcccgtaagtacggataccgatatatatagccacactcgaggcaggtgaccgacacgtggggcatgcggttctgtctcaagcgtactcgggccgtgaccccggggatgagtggggtgttacagcgcttacagaagctacgcttgagatgcttcggaagcttaacccgagctttcatagctatcctcctggcgagctccacgtacctccgtgccctgtccgggtcctcgtagtacaccgtccgggccagcctcaacagccgctcagcgcgctccagggctatcctgcgcaacagtaacacccccgaacgaggggattcgaccttgcacacctggctcctgctatggctcctgctaccgatgacacccgcgcaggctgatccgacgagtcactacctggaagtccatccggataccgtcccggtgacgcccgaggggagtccgctagttcctgcctacgtggaactaaccgacgaggggaaggaggcagccctctccctcctcgagcgtctcggaatcccgtcggatgaggccgcggtgggatacctggccgacgttttcgtcggggagtcgtgccatggaggcactcggtgcctcgtagtctacaatcctcaggacaccaccgtcgaggtgcgaccgtgggaggaagatcggctccccctaaggttaccaccgctccgactggacgaccatctcacggaactgctcctgtgtctaccggtacgggagcagatcacccttcaaccggccgttctcgagctcggttggaacctcgaaatgatgcagcgatgcaccaaggccgtccgcctgcacaaattcggtgagccgacggccgtgatcgcggtttacgtacccaccgaaacggccgctctccgggcgttcgaatcgttactccccgacccacggaacgttgcccgagccatgctcgagcgtctctcctccgaggtccgcgatgcgatcgatgagtatctcgtgcgagaccggctggaaaggttggtgaaatcgaggctagggagtgacgtctacgatcgggtcagagaatacttctcttcgatgatacatttgacggtcagcaagatcgaggagctgtacgacgagagggtcctcccagcactgatcgaatggtgtgctgccatcgtgcggtacgtcgaaacctcactcattaccgcgttcgcacttctgtaccccgacaacccgagcgcagacgtcctcgagcgccgggtggccgtgtacaactctccctacttccaaatactccgagactggctgctcgaaccttcctacacggcctggaagagcgttctgtgcgatctcgccgtcaccgtggccgattcgatcttcgaggcagcacgaccggtcctgtcggccttgagattagactccgaatcgagccgaacgacgctcgaggaaatcacgaagtccgccgtgaagaacttcattgaagccctaggtccctgtctaaggacagtgttagagctgcttctactggacacactcatggggctggcgtgggcttgctgaggttcttacaaaggcgcgtcctcatcgtcgggtgcgggaacgagttgttcggagatgacgggttcggaccagcagtgatcaaagaaatcgagcgccgtggatgggagcatccggacgtggagatcttggacgcaggagcgggcgctccgcagaacgtgttctcgctaatcgacgaggattcgaaggtcgagtacatggtagtggtcgacgcggtggacgtgggagcggagccgggaacactactggagttcggcccagaggatctcgatcccaactgtcgcatagtaccagttgacgcccacggatggagcatagaatccgcactgctggacctcaacgagaggatcggtatcgacttccggatactgggatgccaggtgaaagagctaccgattcccgaggtccaacctggtctctccgatcccgtccgtaaggcggtaccgaaagccgccgaccgtgcgatcgagctcgccgagcgttacttgggtgaaaagactcgatagaccagtccgcggtacctgacgctgagtgacctagctcccgaaggacacgcccgcacgcactctccgcaccctaagcactcaccgtccggtgatggacagatttcggagcaccggccgcacgctaggcacctctcgtcgtcgacatccggttccgcctcggtccgaggacccatcacccacttcaacgcctcagcagcgacgtccacgcccaacgcttcacggagctggggccaaagtccgaagggcggtgtctcttcgaccacacgacgtaccttgtcacgcgtctcttccgacgggtaatcaccgcttaggtaatgtgagaccgtggatgggtcaacgtcgagccgcgccgccacctcgacgagaggcagctcggatgccatccgctcggcggccagggcgcggatcacagcctccaagttgagtctcccgcgccgtaaggccgaccacccctgaatcacggtttaatgcgtcctagaatgtccagcgatcgtgcgagccgtacgacccgtacaattccgggtgatccaacgcgacgtgctcccttctccagtaactcccactctaagtcgctcacaccgcctaacaccacaagcaggatcgagtacgtgagtgtccccacggcagatccgagtaacagcttcagcagagccccgttagtgaagagcatggaccactcggtcgtgagccatgctgcaacgcctgcgatcacgggaactagcgcccatctcagcttgagatgagctttggcgtgtaccattaccgcgcggacgatcaggatcatcgcgagccaatcggagatcgccgtggcgacggaagccccgaagatgccccacttcggtaccatgattgcgttcaggactacgttcgcgaccagcgaaaacgagagaacgaccagcggcaggcgctcgcgccctattccctggagcaggctcgcacagctgcggaagaccactatgaaagccatggcggttggcagcacgtaaagcgcctgggcacccggccgaaaggcgggaccgaagaagagcgtgataaggggctccgccaacgcgcccgtcaggaccgccaccgggatcagcaacgtccacatcgtcttaatcgctatatgggcgtactggcgtagtgttcgctcgtccttgagggcttcggcctcggaggccgccggaagcagcgcggtcgccaccgccgcacacaacgtggtcggaaggcgagctatgggaccggccgcgtcgtagtacccgacccaaagggtccccagaaagtacccaatcgccaggaggtcgacgttcgactgaatcatgtccgcgataccggtcagcgcgaccggaaggccgaaagttagggcgtccttggcgacacggtccgaagggagcggttcaccctccctgggtatcttcgggaggtactcgctcctgagcttggccgccccgtagagtcccgatgtggcgtacgccagcgtcgccgaggcgaagacagcaccggccggtccgtaccccgccaggatgagcgcgggtgccccacccactcgggtcccctgctcgacgaactgcgtgaggacgtaccggcgcatgtcctggaacccttggaaaacaccccggacgcacgaagcgaaggccgcaaagggtaatcctatggccatgatcaggagcggcgtatagaggcgcggattgtggaagtaccacgaggccaggtacggggcggttaacgccagtatcaatgcggcgagagtggacaaggcaaccaagactagcgtcgggatcacgatgaactggcggaccttcgtcccctcgccgagcgcgtggtacttagcgacgtacctcgcgacggcgggtggtaccccgaaggtagccaagaacatcacgatggtctgtatcaccatggtagacgacactattccgtacccgtcgggccccagcaggcggcccacgaggagccggtacacgtaccctcctaatcgaaggaacaacgagccgacgaggaccgtgagactgcctttaacgagcttgaggagggacaacgagagaccccgtcactcctcgtacaccggcgtaccttccttcttcgtgagctcccggaacgcctccatgatacgcctcgtgatgggtcctgggcactcctcgccgatcttccgcccgtcgaccttcctaacgggggccacctccgccgccgtgcccgttaggaacacctcgtccgccgcgtacagttctcccagtgttatccgcttctcttccacgggtataccgagctcctcgcagatctccatcacggtcgccctggtgatcccccggagaatagtgtcctccggtggagtgtacacggtcccgtcttccaccacgaacacgttgtcaccggtaccctcgcagacgtagccctcgtggtccaacatgatggcctcgtcggcgcccgccaggttggcttggatcttcgccaggatgttgttcaggtagttgcacgacttgatcttcggatcgagcgcgtccggtggaatacgacgcacggaggccgtgatcacctcgatccctttctcgtacaggtccccgtacaacggctccatcggctccgcgatgatcaccacgttgggttccggacacttctccgggtccaacccgaggtcaccttcgccgcgcgagaccaccacccggatgtacgcgtcccggagctcgttggcccgtacggtctcgatgatggcctccttcatcttctccttggtcatcggtatctcgagcatgatggcctttgcggagtcgtacagtctgtcgacgtgctcgtccaacttgaatatccggccatcgtaggcccgaatcccctcgaagacgccgtcgccgtacaggaacccgtggtcgtagacggagattttagcctcttcccgggggaccagttcgccgttcaggtagatgagctgctcgcgctcagacaactcggaacccccagccgctgcccgacgggtaacgttaaaacactctccctccggggatcgcgtggggctcggaggggagatgctccagtacgtgatcctggagtacgtcctcagcaccgtcatttcattagtcatcgaaaagtatgtggtggacccaacgacccggcgctaagtccgtcagatggcggagcgtatcgttagggaagtccttcgagaggcccggaggcgcggcgtgagcgtgagcgacttgttcagctccgagggatgggtcgtgaacgagatcaccgaccgcatctcgagggtgctgggatccgtcggggcaccatccgaggacgtccgagagagcatcctcgaggagacatcttccaagctcaagtcacccacgacgtacctgagctcgatcgccgagacggtatctcaggttctaccctggggcgaggaggacgctgatgcattaccggaccacgacttctcggagaaagtgctggaccatctgctcgaaggagcggaggagttcgtgtgcctcgcgagcccgtgggtgtcgagccctaaggacctagtcgaagagggtgtcagatcgctgaggggactctccgaccgcgacttggaactctatctcctggtcgcggcaggtgagaacgagcgggaagtcctactggagtgggcctcgctagggttcgaggtccgtgaggcggaagggcggcgggaaggtgacctagggatccactgcaaggtgtacgccaacgagaagctggcgctcggggccagctggaacctgaccgtctcgagcctccgacgccttcgggccatgcgcgaggtgcatactatcaacccgaaggcggacgactgcgaggtgtgtaacgcgaactacgagcaactggtttcagagttcaactcgcagtggtcggaagccaagcagaggttcttccgggatgagggtctgaaaggtccggcgattttcgaggtgcgctgggacggcgatcggccgacggaggtcgtcatctaccgggagaacggtgagcgctggttcaccgtcgagctagaggataaccatgagggtttcgtgttcaacgaacgggagggcctaccggtacgtcgaggagtaccgagggttcaccgctttgaccttcgaggatcccgacgccgcggccaagatcgtttatcccttcgtcggactcaagctcgagaggatccgtccggagcatctggatgtcgtagagcgggacgtgagatggaaagataacgcgaagaagtacaaacaccagctcacgggccgtccctacgacggcgcactcgtcgtctggggcctggacccggacccgaggtcggacttctacgtcgcgggtgggaagctcctggtgatcaggtgcgaggaatcgggtgggagcataacggtagagttcgtcgacgccgccgacccaggtaacctacccgactgggtctcgggttccgtggacctcggatggctcttcgacaggtcctcgggagaggggaccccgacactcttcgtctacgactgatttttctttcctattttttctttcctacccttttcccttcatcttcgcgacgaagaatcctgccgtgtcgtgcctgaacggccagtaccgccgcaccttcttgtacccagagaaccgctcccctcggaactcctcgatcccgggggaccctagtacgccggcgtcgaccagtttcacgtcgaactcctccaaggcgcgcttcacgatagcctcgttctcctcccacgataccgagcacgtcgagtacaccagcgtgcagccgtgttcctcggcgatacggagcgcgggctccagtatctcccactgcctctctgcgaaccgctccaacggcttgggcttccacctactgtccgggttcctgttccagacccccgtggtcgagcacggtgggtccacgaggatacgatctggaacgtcgggtaggtcgtccaccgtcaacccgcgggcgtcccggcagatagttcggacgcaggtgatcccgagccggcggcaccggcgctccaggacccggagtccccactccgacctgtccacggcccacacttcgccctcgtcgagcatgcgctccgccgtgtgcgtggtcttgctacccggagccgcgcagacgtcgagcacggtttcacccggctcggcgctcagggcggcggacgcggacgccgacgcgaggtcttgcacgtcgaacagtccctcccgccaagccctcgatccgtatccgcggcccctgaccagcgcacgcacctcctccaggaacgtgggctccgtcacgataccgtactctctctccaggacgtcacccgcgaccagcgggtctaacttcaaccggtttatacggaggtactgcggcggcacccggttgttcgcgcgtaggaggagctcgaccctactccgatcaccctcgaacaaatccagcacgtaaaggacgaaccactcgggatgcccgtacttcagtgcgaggcgctccgtccacgggcgatcctccagcacgtccttcacggagacgcgttccacgccgcggagcacggcgttgacgaaggctcccgccttgctccctactaacctcttcgcgatcctgaccatgcagtcggtcaccgcgggtggagggtttctccagatcttcatctccagggtgccgaccctgaggatctggcgcacgtagggcgacctcacgtcctcgggatgtgcgtccgagcccgccgccacgagctcgtccagtaggttccgccgcttgatcgtctcgtacacgaacgcctgcacggaccgtcggacgtcgatcggacggtcccggcaggtacgctccacggcctcgggtatcggcattcctcgggtttccacgaggaccaaggctttaaccgccagcagctggttctccatgcatcgccaccccggcgggtgatacggtggaggtcatcaaggtgggcggagaggtactggaccgtgttgaagacctagcccgggtcatcgacgattccattttggtgcacggtggcggtccggaggtctcggacgtgatggagcgcatgggactagaaccgaggttcgtccgcgggctcagggtcaccgaccgggagacgctgcaggtggtgatgatggtcttggccggtttagtgaacaagcgtctggtggctgagctgcgctcggagggcatcaacgcgttgggcttgtccggggtcgacggcggtctcctgatagccgagaagagatcggaggtagtcgacggggaggaggtggatctcgggtacgtgggtgacgtcaagcgcgtcaacgccgagctactcgaatcactgctggacgccgggtacgtcccggtggtcgccccccttggggcgggcgaagacgggaccgtgtacaacgtgaacgccgatacagccgcgggggccatcgccggagcggtgcgtgcggatcggctcgtactgctgacggacgtacccggggtcctggaagatctggacgaccccgagacccttatcgagcgggtgcgcccggaggacgtcgaggagctcgaagaaaagggaatcgtcaccggaggtatggtgccgaagctcgaagccgccaagatggcggtggaggcgggatgccgagaggccgtgatcacgaacctggaagggttgctcgaggggaggggaaccatcgtgaggtagctgcgcacctcggcgagaaaatcgaaaaatatatctccaaactcccaagcgtgttgaacgaatgcaaacccagagaccgtgccggagagcgtctgctagacctggcgagcaggtacttctacgatgctcggtacttcctcgacaggggcgagatggtggaggctttcacatgtctgtcctacgcgtgggcccttctgagagccggggccgaagtaggcgtgctggacgtcccggaggatgaagtgtgacccgcccgcaggtgatgattgtcatcccggctgaccctcccgggcatgatggggaccacccagctgaagggggcgtcgtcgtaaaattggtccgacccgtgtcggtagggaagcacggcggtgtatctgtagaagtcctacacccgtcggatcttcccccacagctgacttcactctgtaagattaagatcaacggagctagggtcatctcccgtaggagcaatatcgtagccttccgaggtaggccatccctggaaccgctcaacgacctcgacggtttcatgtcgatcgccgcccgggagagcgaggtcgtgatggtcggtgatccgtacctgcgggtgctggcggtcgaagagggcgaacggatcgtcgtaaatacggatcgtctcctcgcctgtctcgactttgagaccatagaactgaagaacgacgagattaccgtggtcgaatgcgtaggaccagacatcgtggttctcgcgtgttcgagccccgtagtagcgtcgctgaagttggaaggggacaccgcacacgtacaggcggggagcatcctgtgctggtggaacatccacacggagaacgtcggtgacttcctcaggctcacgggtcaaggccacgtgatgctgtccatcaccaagaaaccggacgctaccgagaaaggcgccagtaccgaaaaaaccaccgcaccgaggaaagtcagctcttggatttagcggcccccgatggacccaatccgcaataatgttacgatccttgtaacgatttgaggtttggtgcggccgccgggatttgaacccgggccacgggctcggcaggcccgcgtcctaccagactagactgcggccgctcgctccgccgccacccggctccccatctccctactaaatatctttttcggcctcacgcaacgccgcctctatcgccgggacggcctccccgatcacctcgtacccgtgtccggggaagatcgaccgaacacccgtactcagcagccgctccagggattcacacagcttcttcctgtccccgcccggaaggtcccacctacccggaccgaacccgaacacggtatccccggtgaacgccaagtcaccgagcaggaaacagcagctcccgggagagtgtccaggggtgtacaggacctccacctcctcaccacccacgtcgaacgtctccccatcccggaacgtgaaagaaggctcgtacgcgggcatcgggcgtccgaagaggtacgccgccgacagcctgtcgtcgccctcccgcagtacctcggcctccgcccggtgcacccctacctcgagcccggcctccagggcatcgggacccgcggccgcgtggtcgaagtgactgtgcgtgagcagagcgtacctgacgtccacgttccccggcaacctgtcgatgacctccccggaggccccgagatcgatgaggatcccctcgtcgcccacggccagcaggtagcaattgcagtccggcgagggtgtaatccccttaccgccgacccggaacaccctcacctcaccgtcggagtacacctccaacaaaggggcgactcccccatgcgacccgaggagctcgcgctgaaggccgtacgggaggccctccgcaggacggtgttcgacccggacgcctggacgcacgtcaccgtggtatccgacgacgccctccacgtgcatatcctcaccaatcagcgtaagaacgttgagggaaagggcggccgtaaccgacagtacctcgaggggtacgccgaggggtacctggccgctcacggacacgacgtcgaggtccgcgtctccgtcgtcggagcgggcctgagggacgagaccgaggagttccggtacctgccgctgaagcgggccctgaaagaaggggtaatcgaggagggatcccctatccaccgtgtctgcgagcgactagggatcgggtacgtcgtcctcggtgcccgcgagatcgtcggaccgaacccggccctcgtcgaagtcgtcgagggcctcgagggagagcgcgccgtcgacgtcttcacgggaaccggcacgggggcgctcgccgcggtcgaggcgggcttcgagcaggtttacgcgatcgacgtgagggtacaccccgaggtccgcgagcggctggagtcggagggcgtcgaggtgatcgaggccgacttccgcgacgtcgacctgcgggagttcgaaccgatcgacctcctcaccgcggaccctccgtacgcgtccacactcgagttcctggagaagctgtccgaggagcgtccccgggtcgacaccgccgtcgtctgccacggcttctcctcctggacgcgcgccgtgcgggagatccggggcttcctgatcgagctgttcgaggacgtcgagccggtgtccaagtacggccacgagctcagcgtctgccgccgtctacgggactgatccatcggacacccgcttccgtgggaggtggtatgagcgtttacgtactactagtcacaggtactcatgttgaaatagcactatatatgcattgtttacgcattattatgtgataacagtaatacaatcgttatggcctcaaagcagttacaaaatcggctaaatcagggtcttggatgtggcggtaggttaaccagtacgaagcctgtcctagcggtgaacgatcgtattactggtacctgactaccgtatgtgtataatgcgtggatagtacagttcctacacgagcgtccgtggactaccgtacgtaagtgctcataccacttgaagacctgacgtcacccgcgctggagtttccagcgttggaactctaaccccacgtcgggtacctcgtgtttctcgtcgagggatttcccgcggtggtggatcaccttcctcaggtagctcgagtagtgcgcgggccagcctcctagggtcctcacggcgaaggattccaacctgtcgggtagttcttcgagtagatcccggattcttggtgactcggagggtctggcgtcgaatgctagcgcgagcccgcgggcgagtacccatcgggccttcttgtatggcaagtccgagacctcggtcaggagggtcttgagcaccgagcggaggttgcgcatgaggtgtcgcgcgagctccagaacctctctacgatctaaagagactaaccattcaacaaaggaaacgctctcgttctcgggtttgcccaggtagagcgtacgaccgtgcttgtgtcgggggtcacgcctccacctcgccacgtagtacgggccgcacgtactaccgttgacggtcctgtaggttacctccaggctcggcttcttcctcctacggtgaacttccctcaggactcggagcgcgcggatccgctcgaccgggttgtagggtatgggtgcgtgcgatctaaccaaccccggcccacgatcccgagtactgcccctaagttgtatggaggcatggagagaacggcaccccgggatataaaggttgtcaccagaccctccgagctggacgagctcggtgactcgtaccatacaactcctgtgggaaggcaactcgggcccggacgagggcgcaccctcacgataccgggggatgtcacgccgagccgaactcagcggcgctcgacgtcgactaccctatcgagcaccaggccgcccggtagacaccgctcctcgacgaaccgctcgaacgcgtccttaccacctcgggcccggtaccgcaggtatgcacccgcccacagcccgagctcccgcttccggaccgagtactcgaagggaacgcgggtgagaaaccgctcgacgtgttcccctctgaaccctaacccgaaaacggatcgacgtccatctaccgaggtttcgtacgatccagcctcaagaactctcgcatacacgccggtcgtgcgcttcagcaggctactaaccccctccagaaactcagatgactctccccagggcgacgcctgagcgatccctacctccactctgttctcacgagccgatatccaaccgtccgccccgaacagaccagacaggaattctaatgcgacccgatccggccctcggcgaactaagccgggcacatgaaccctccccgtcttcctcccttccggcattcccagtcctctcaacagcgccgcgaatccctccgagtgcaccgcgacttcgaccgcgtccctatccccgtactcgtaccgcaccggcgagaggccgagcgcgcgcagatcgtcctcgagccaccgcagtccctccggctccccgtagaacgacgacgtcaggctccagatggccgtcgccgatcgcgtaccccagaacccgggtcaacgtcggtagcgccggatcctcccacctaagcggtagtaagtccaggtcccggaggaacctccgagcgccctcgggtgcgtcgacgtcggcgagcaacgtgccccgacggtcggccgccggcggcacccccaccgggtacagcacgacccgatcgcccggcttcaggtcgcccagtcggcgcttattccgggatgaaacccacatgtccgccggacccgcgatttcgaaccccaactcggttcggaggaccagtccttcatcgcccgagtccgatacacctacatcgccccatcgagccggccactttgtcgagagctgggtctcgcgccgggccaactcgcggagcatccgccgtgcccgctccgattgctcgggattgtaccggaactcgacctccgagaggaacctccgtaggtccctccgaccgcggatcagcacctccacgcgggcgtaccggtagtgccccgatgagacgtgggacagtccgacgacctccgcgtcgacgttcagtgagcccaaaagtcggcacacgtcgagcgccagggacagtagatccagttctcggtccgcccgagcccggagttccaaccggacgggtcggggacggctcccgtcgaacccgagcacccgaccacgcacgctgtagagaccggacaacagctcgcgcgccgcctcgggatcctcgaatacccagttcgggatcccatccacggggtccgcggacgcgcccgccatgatcagcgctccgatgagacgaccgtctcgggattccacgctcgtccaccgcttgccgcaccgaacagacgggttcacccctaatcgactcagatccgcgagcagctccgacgcacctcctatcgggaccgaaagacgcacgcgtggtcgatcgccgtcgcggaacgttccccgacctagcagcactccgaacaatctagcgaggataagctctgggttcaacgcgggggcctcacggtgaggtgtcgggagggtttaatgggaggacgatcgcggtttgccgacgtccccttctgtaatccggaaaccgttcgttttgaaattcgtaacgattctgggcttggtgccgcggccgggatttgaacccgggcccaccggatggcggcgatcccgcggaatacccgcgggatctcttcagtccggcgctctcccaggctgagctgccgcggcttcggcgtcacggccggcgacacatactttctatttaactttgtcgccggcctgaaggctcggatcgccgaccccgtgctcggctttcgcggcgtctggctatttgtgcggctctagttgggagatcgttcgcgggtttcggagcccgcacagacggcccagtccgagggtataggtgtaaagaaccgtcgaggtccgtccgcgggaacggcgatcggtggggtgtccgggcttgtacctgacgaaggaggaggagcggatcctggacggcgaggagggtgagctgaaggctaagctcatggaggtattggtgaagctcggggacgtcttcgacgcggagcgactcgtgaggcccgcctcggtgcacgtgtccggggtgtcgtacgggacgatcggcgacgcggggctgaggttcctgaggaaggtggcggaggccggtctgagggtttcggtcccgacgagcgtgaacccgtgtggcatctgtctggacggtaacctcccggtggacgaggagttcgagcggaagcaacgcgagatcatggacgccctggagtcgttgggcgtggcctcggtgtacacgtgcgtaccgtaccagcaggggttccaaccgtcgcgcggcgacctcctggcgtggggggagtcctccgccgtcttcgtggcgaacacgtactacggtgcgcgggcgaaccgggagggggcaccggcgacggtcgcggcggcggtcgtggggaggatcccggagtacgggatgcacctggacgagaaccgggtggcggagtacgaggtggtcgtggagttcgagccgcggaacgacttcgagtggtcggcgctggggtactacctgggggaggcgctcgacgggatcccggtgctgaagttaccgacggttccctcgctgtcgaacgtgaagtacatgggagccgcggcggcggcctcgggagcgctggctatggcctacatcccggggatcacgccggaagagccgcggatggactgtcccgagcgaatcgaggtggagcgggaggacgtgttcgatctcgtggaggagcggttcgggacggagcgtgaggggttcgcgttcacggggtgtcctcacaggcctgacggtgagatcccgaggttcgacggctgtgcgatctgctgtccggcgaacgcgacgctcgatgggtacaggctccgggggacgtgccccgtggtcgcgccgatcgaggacgtccacgacgtggtgttcacggactcgctgaaggccgcccactacctggcgtcacgggtcgaggtgaacgtgggtccgctgtgatcggggaaaatcataagtaggacgacgtccgggacggctttgggtcggggccgtggggtagcctggtctatccttccggctttgggggccggagaccccggttcaaatccgggcggccccaccaattctgagaatcgttacgaatattataacgatttgggatttaagaattgattgagcgaacgaggttaccgacgtagctcgggtagccgcagtatcctcgtggctctggtgagatccttgatcctccactcggactcccctagtacactccgctgagcttcacgccagcggtacgtcagcctcgccctccaggagtccatgcgctgcgcgtccgtgtggtactcgtcgtcctcgctcatgagtatcggacgctcgggttcctctgtcggatctacaccggcccattccgccagctctcggagtgcttccagtcctcgctcggtaatggggaactcgatggtttcctccggtttctcgaccctcaggcggggctcgtccggcgtttcttcgagccagggctcgccgggacacacatccgcccagcgcatcctcactaggtccatcacgctgattcccgattcggcgatgatgcggaacggcgcccaccaggatgcgtccttgttttcttttgcccactcctcgatcaaatctaccagctctaaaatttcacgagcgtcctgctcggtcatctcgggcgatgcaggcgatccgtacgccttcacggtcaggacgagcagtgggtccctaccaacggctcgtagggctttagtgagcgcgtaccagcacagtctacccatttcatggtccaactccatgttacggactgactccaccagcaagttacggagttcgcgtgctacctctaaaatctcctcgtctggggccttctcgagccactcttccggctcctcgtcctccaggatcctccggaggaactcatccagcctccgtaaagcgaagcggtatgagtgccgggtgttttcgttgcgtacgtccagcagatccgctagcttctccaaggccacggggggctccccctacgtgaaagttttacgtggcgtccggatgggccccggctcccagccgtggcgccgtcacgccatcagcacattagccgttgtgctatattagttatgttgaacaccgagaacccgacataaccgaaggggtatcgcgacgtgtcggagctgaacgtagtggagctgttccacggtgacctgtactccatcgcgtaccgggcggagctggacaagttcctaccgatgatcggaagggcccgcatcaccccggcagagctgacgctcgcgggactgctggagttagggtatgaggtggaagttactacgttggaggggaaatcactacccggtcgacgaaggatcgaattggcggacgaggtgaaaggggttgtgaccggacgatacgtggaggagctcctagactcggaccgcgtgcatcacctcaggctttccgctaggtgtctcggggcggaggtcaagatacgctactcatccgactggaaggtggaaataggaggctacgaggtggacccttcgaagctccacaagaaccgagcgttggtgaagctgctggagttcgtgtcgacgcgtgagccgtccttcacggatctcgtggtggacctaggggcggctcccggaggctggtcgtccttcgcggcgcagatggcggagaacgtggtcgccgtcgaccccgcgaggttggaggatcgcgtgagggagctggagaacgtgcaccatctgcgtatcacggctcacgagttcgtcctccccgagatgatcggggtcggattccccggggagaaggtgacgctgctctcggacgtctactccgggaaccccgaggacgacctgtatgcggtccttcgactgctggagcgtctcgagaacgacgtcgtgtggggtttcgtgaaggtggcaccggcggaggacgatgtgttggaatggttcatggaggaaatcgaagaggcggggttcgcggtggagaacgtcaatctcgagtcggcgagctcgaacgagacgttcgtttacttccgagagtgaccgtggtctcgtgacggtagggtggggagcacacacaaagtatcctcagcgtctccgagccgtcgttctcgacccaatgtaccgaaccgcgggggatctccacgcagtcctccggatggacctccaaggatctcgacccgacgtgtacgatgccccggccctccaggacccagtacacctcgtcgaagtcgaggtggtagtgcggtaccgtggactctccgggcggaatctccgcgacggccaggctcacggtgttaacgcgggagaactccgggcgcacgacctcgtagatcagcgagccgtcaagggtcacgtagggcacggagtcgcgcggactgcgtttcaagacccggtactccccgtgaagttagtggcgaacgtcggatgggaggccgcgtgcacgtggacgtacgttcccaacacgttcgggaggtctttgggccgaaacccctcccgtccgcgccaaccttgaccccggattatccggtacgcgctctcgagaccctcgggcctcacgaggcgtgagtaatgaaactcgtggcccttgaacgtctcccccttacgcgttaccggggtgtcgtccacggcgcgggcgaccgtgtagctgaggccttgaaccctatccgtcatttcgaccgctacgtcgaagacacccacccacctgtacctgtcctcgttccacctgagctccctacacaggtacatgaagccgccgcattccgcatatatcggggcgcccgactccgccaactctcggatggagttacgcgtactctcggcatcttccagctgacgtgcgaacagctccgggtagccgcccccgatgtaaagcgcatccgcgtcgggtggaacgtcctcgtcgcgcacggggctgaactccaggagcttcgcgccgttctcctcgagtgcctccaggttctccgggtagtagaagttgaaagcctcatccttagccacggcgatgcggcatttggtcgggttcacttcccagggacgctccccgggccccagcggaccggcggcctccgccacgtcgatgagcgcgtccaggtccacatgctcggagatcacctcggccactgtgcggagacgttccctcatctcctcgaggcgttcgggggtcggcaccagacccaaatgccggtattccaccttgagcctgcggtccctagggacgtaacccaggaccttgacgtcggtgtacttaaccagggcgcgtcgcaccttgtggtagtgaacctcggacctgatgcggttcagtatcacaccggctatgttcgctccttccagttccgcgtagcccttcaccaacgccgccacactcttggtgagactccgggcgtcgacgatcaacactacgggtgcgttgaggacctcggagacgtgatacgtgctccccctcacaccgacggcgccgataccctcgtaaagccctcgaactccctccacgacggcgagatcggcgccctcacatcggtgctcgaagagccatctgacgtgcttctcgcggaagaggaacgtgtcgaggttaccgcacggtcgcccggaagccaaccagtggtacgacggatcgatgtagtcggggcccaccttgaacggttgtacctcgtagccgtcggctcgtagcgcctgaattatgccggcggtgatcatagtcttaccgcaggcgctggacgagcccgcgagtactatccggggtatcggcaacagggcacccctgtttccgtgtatcataaaatttgatatacaggacttccacgccgaccgctcgggggaaaagcttcacggccatgcgatgcaggagatgcggttcctccaacttggaggagcgtgacgaaggcgactacgtcgtcgttaagtgccgcgagtgtggtcacgtcatcgtccgcaggaaggtagggtcggcaggtctgaccaccgagacactgggtatcgccgtggccgcagcagtgaccgcgacggcgatcgcctcgacgctcgtgtaagaggttagggaagacggaaattagggtcatcggaaggcccgcacggcccctcgctcgttggatgtcccggcccggtacgcaacggcgcccatcccgggaggggacacctcccaagtcgcgccgccactgggaagttgtgtggccggggcggggaaatccgataccaacgccccgactccgtatttatttcatgaggtgcttggcgtacttcaggagcgacggtttcctgctgatcaccttcttggccaccttcacgacttcctctcccttcactaacctgaggatatcctcacggtccagcgcctccgccaatgcgttgagctcctcgttactcatttcggagaatatcttagacgccttcagggcgtatttgaacgtcttaccgaactcttcctcccaccggtcttggtaccgtttcaggaaggaggcggacgtgtcgtcctcttcgatcgcctcggccgccacctcgcccgcgatccgaccgcaaaccagggaagtatgaagaccaccgccggttaacgggttgacctggcgggccgcatcacccacgaggaggatcccgtcaccgtacgtccgctcgacgggcccgcacaccggcacaccacccacgttcacttccacggggacggcgtccgccaccgcttccgagatcagctcgtgatcctccaaggcacggttcagtaccttcagcgcatccccgggttcggattcggaccctcggatacctaatcccacgttcgcccgaccttcgcccttcgggaagatccagaagtaccctcccgggaagaactcggcgtcgacgaagaagtgcgtggcgtcctcctccacatcaacgcccaccatctcatattgcgcgcaggtacacatctctacgggtttgagcgatggaaccagtccggcggttcttcctatgcgtgattcgattccgtctgcggcgatgacgatgcgggctcggacctcgtgcactccatcctcgccctcgtactcgaccccgaccacccgaccctcatctaacaacgcccgtcgagcatgcgccaacaactcgacctccgcaccagcctccaccgcccgaacaaccaaccacttatcaaacacacgacgctccaacacgtacccgtcaccggggacctcgaactccttcccgttgggagcgtagatgagggcgcgcgagatctcggtagcgatccactcatcctggggctcgatgccagcgtgttcgagcccgtgtgcacttattccttcggcgcactgtttggggacgccgatctcggccttacgctcgagtatcaggacatcacaaccggcctccgccgcggcccacgccgccaccgaacccgccggacccgcaccgaccaccaccacatcgaactccatagcctcactccccctcgttctcgatggcgcccgtcgggcaaaccttggcgcaaataccacagtcatcgcactcaggaccgaactcgggctttccaccggaaatcgtcagcgcgtccttggggcagaccgcagcgcacgcggcgcacccgagacagcgttcgaccatgactttcaactccgatcacctccctcatccagaaactcgatcacatcgagacgctcacattccgcttcaacctcaacaagctcggcgagactggggcgagtccgtccagcatctccagatattaattctttcacgtacagtcccgggtcgcagaggaactcgatgacggctcgatctccgtcgtactcgatcagcttggcctcgtgaactcttttcctcctaactttgtccgccctcctgtggagcacgcgcctcggtgtcctctgctctatcacactcctctccagccccttcaggacttctctcagcttgtcctccggaactggttttccgaacttcacccacgctcggtacctcttccgggatcgctcggagaggtcttttaccttcccgacgtcttcgggatccccgtactccagtcccaccacctgtacgtcgtcgcccaccttccggttgatctctccttcgatctccttaaggtcgacattccggcgcttagggtacaggagttccatcacgaaaggtctaccgtttccgagcattctcacgtcgatgtcctcgcgacccgcggcgtggaacttgtgcgactccgccaggaaggcgtccttcagcaccatcccaatgagttcctccacggactccgtgtacagcttaccggtgaaatcgcagttcggacatcccgccccccggcaccgcgggcagggccacttcgtctgcgggatccccctcctcaacttaaggtagcgccctcgcacgtagatggggcgtacgtggacttcgaacttcggatcctccaaggagggccggaaatcgaacaccacctcgatatccgggttcctcggatccgcgcgcacgtccagcaggtgttccaccctcttaccgacctccctgttgaactcgcgtttgatgggttcaccctcgacgccgagcgtctcccagagctccttctcggctttccgtatctcctccggccatctggatcccaccacgaacccccgaaactcaaggtccttcaactcacacgcgactacctcggcgaactcgtccactttgtccagcactccacggcatacaccacagggttcgggctcgggagggtcgtcgagtaccgctgcggcctcctccagcccggatcgggcgagcagctcgagtgtctcctcctccccttccaagtgtgctcgcattcctaggtacagcttaatggctcgaccccgctccctgttctcgagccctgtcaacccgtaaccgaaggcccggcccaggcaggaatcgcacggattgaaccgtttcagcgcctctcgtagccgatcgatcacggcggatcaccacccgtgagtcgctccgagagacgttgacatcgacggatcggtgacgacggctaagacttgcacccgagtacaacggcagcgtaaagcgtccgagcggtttcatgcacgccacgggttaggagctcctgggtggatcattcccgccttcttccgtcgtgggttgccctaccgttgtcgatgcgataacgcgactatcacgctcgcacaaaaagtcaaagcgcactcaggtgggaagacagcacactaatccgccaccgactcgggagtcctgaatccaagtcgaccttacgtaagtgcgttaaaccccaccgaagtccgccgctgcccccgcgacaccatgaacggcaacggtttaacccgcggtgcgatcgtaaggcgggggttcgggagcatgcccagaatagtctccgtgaaggccagggaagtgttagactcacgcggagaacccacggtggaagtggaggtggaactcgaagacggtaccgtcggtcgggccatggtcccatccggagcttccacgggcacgtacgaagcgctggagctgagggacggcgacgatcgttacggaggtaagggagtacgccgtgccgtcaggaacgtggaggagatcatcgccccggagatcgagggactcgacgcgacggcccaacctgacatcgaccgcacgatgatcgagctcgacggcaccgagaacaagtctcacctcggagcgaacgcgatcctgggagtctcgctggcggtcgcccgggcggcggccaagtcgctggggataccgttgtaccgatacctaggtggtccgacggcgcgccgactgcccgtgccgttcatgaacgtgatcaacggcggcgagcacgcgggtaacgaactcgacttccaggagcacatgatcgtcccgcacggcttcgagtcgttctccgaggctcttcgagccggtgtggagacgtaccacgtcctcggggagctactggaggaggagtacggacctatcgccacgaacgtgggtgacgagggcggttacgctccaccgatgaaggatacggtggaaccactggacgtcctcgtggaggccatcgaggaggccggatacgcacccggcaaggagatcgcgttggccctggacgcagccgcgagcgagttctacgacgaggactcggggacgtacagggcgtacggtcagaagtatacccgcgacgagctgatcgacgtgtacaaggatctggtaagccagtacccgatcgtttccatagaggacccgctgcacgaggaggacttccggggcttcgccaagatcaccgaggagctaggcgataaggtccaaatcgtgggtgacgacctgttcgtgacgaacccggaccgcctgcggaaggggatcgaaatgggggcggcgaacgccctgctcctgaaggtgaaccagatcggaaccctgacggaggccgtggaggcgggtgagctcgcgcttcaacacgggtacggtgtgatggtgagccaccggagcggcgacaccgaggacccgttcatcgccgacctggccgtggccctagggtgcggacagatcaagaccggagcgcccgcccgtagctctaggacggccaagtacaaccgcctgctccggatcgaggaagacttagccggggcggcggagttcggaccccggaacgacttcttcctcccctaactctcactctccggtatccacaccttcgacaccacttctcgagccatcttagaccagctcaggaaatacacggtccacagaacgggcgtagccgtcgctatagggaacgtaacccaccacagtcccggagatgctgccgaaccagcgaagaacacggacaacagcgcgaatactaccgagaaaaggatcaccctatcttccctaatcgtcgctcgtagtgccatacaccaccgtacggcgcccctcggatcgacccaacgtagcgtcttcaccaggggtaccagggaaaccatggcgatcacgagttcgattaccgccgtaaggtgcgcggagggtggtagcgacttgcgaagcatcgcggtctccgccaagctaccgtgaaggcaggtgcccaaccccgagaatatcgagaccatcgccactaggctgaaaaacgcgcgaactccgtgaagctccacggtcttcacgcggttgttcaacaggaacgacagtaccgacgtcgccaagatccaaggcgcagccgtgaagaggaaaacacccagggccttcggtccccaatacttcaacacgcccctaacgaccgctagaaacaccaggagtgccgacactatcggccctgtacgcagaattttgttgaagctggacgccaagctttgccctttggcggcctcttcggccgcgatcacggtatccacggggtcctcgcgcagggacctttttgcggccttaaccggcagggaggccacgcacaggaaccagtacatccacctaggcgcccacccgtcctcgcggcccagctccacggaatctcccggccacacggccttcacggacccctgcgcttcgtgcaggaccggtgacctaccgagctccaccattttgcatagtacagtcgccacacggtcggcgcccgccctggcgtacgtctctttgtcgacctccgacgcgcgccgttcctcgagcagtcgttgtagatcacgcatgagccgcttcgagtggaaaggtagctccacgtgtccgctccgagtgaggataatcatcttacgtcttcgtctcttgaactcgaagtccacactaattccagtgatctcatccacgggaacttccgtgacgtccttaccacggattatcaacaccctatcctctcctacgacgaccagtttctccctcttcagaacccgtagtaggtacagtagaggcagcagaaggggtgcaactactatcgggatcgctatcgctccaaccaccatcgggtagtgtttttccactattacctttatcccgaccgcggcgactagtccgacgattacgaggttaagtgtcgcgactatgaggaatccggtacgctgatacagccgggggtctatagacgcggggttccaccccctcttacccccggtcattcggggaccggggtggggtactcccccgtgaggcaacccacgcacagctcccgtttcttcaatctgatcgactcgacgagaccttctagagacaggtaagccagcgagtctgccgagattttctcacagatctctggaacatcgaggtctgcggctattagctcctccttcgtggccatgtcgatcccgtagtaacaaggggacaccacgggaggtgacgcgatcctcatgtgaacctcacgggccccggcatcccgcagcatttccactatttgtcgagaggtgtttccacgtacgatgctgtcgtccactactgccagcgagcaccctttgatcacctcccggatggggttcagctttacccggatgctccgtacgcgctcctcctgctccggcatgatgaacgtcctacccacgtaccgatttttgatcagtccctcttccatagggacccccaacgactccgcgtatcccagcgccgccgtccgacccgaatccgggacgggaaccaccagatcgcactcgaccggggcctcctcggcgagtcgcttacccatgcacttccgacattcgtacacgcacctgccttcgatgatggaatccggccgtgcgaagtacacgaactcgaacatacagacggccttgcgttcccttctcacgactttactttcgacgtcgccctcccgaatccaaactacctcgccacgttccagctcgcggcgttcctccacacctaacacgtccagacctaccgtctcggaggaaacgaagaagccacgttcgtcccatcccaggcacagtggtcggaatccccagggatctcggaccgcgattaggtcaccgtgactcgttatcacggtcagggagtacgagcctaccaaccgttccataacgtcctcgaacgcctcgaacatatcgtcggtctcggtgagagcgaccgcgagcagtcgggcgatgacctccgaatcagtctccgaaacgaaagcatgtccgtcggaaacgagctcccgccttagctcttcggagttcacgatgtctccgttgtgggccaaagccagctcgcccttcgagtaccccactttgaacggttgggcgttgacgagctcggaagcgccagtcgtcgagtacctgacgtggccgatacccactggacccgagagcttccgcaggtcgggccgatcgaagacttcggtcactaggcccatgcccttcttcccgaccagtcggagtccatcgtacacgcagattccggccgactcttggcccctgtgctggttcgcatggaggatgaggtaattataaacgcccgcctcgttttccttaagcaggtaacagccggaaaccccgcacaaccactacacccccgggcggtaccctacatgggcacggttctgaccgtagcggtccttctgtggtcgctcatatcgtacccggtcaacgcggtcgagccggtagagtactccacccacggaaccgaatcccccttggacaaagggcattacgcggatcaccgattcgatcgcgagctccgagaacagcctacactaacccgaccggagtaccgcgccgatcgaactgacaccggggaagtcggaagggaatccaaagagaaactagacggcaagcgtggcaagaaccgcggcgggcgtcagcacggcggaggatctgctgacgggcgagcgtcggtacggaacgccaagtggatcggtgccggagtgactctaagcctgtcgttattgggggccctgatcatgtgggagagctcacgggctacgtctcgccgaagaacttcttgagtgacacgctgtggtcgcttccgaacagcgtcttcgcttcttcctccagcagctccacctccgaggcgatcgtcctccattcctcgtcgtgcgtgccgaactcctccaccagtcgcttagcaggttccaggtacttcgtcgccgtcgccgggtagatggttaacagtacgtcaccgccgcaccgcgggcacttgccgctgagcgggggtacgttgaacttcgcattgcagcgtgagcagcggaacttctgacgcccgaacttccgcaggtttcctttgatatcaggcaagaagtgggagtcgaggactatcttcgcaacgtcggactcgtccacggctcggatcctcctggcgaggtcgagctgctcctcgagcttctcctccatcttctccagcctggagtaccgcgtcacggtaggtccgaggtctatcgcctcggtatcgtgggtgaactggagcccccggggtaagtcgagtctgtcctcaagtcgctctatgagctcttccgcctctcccgcgtcggcgtattccaaggccttcctgtacagctccagcgggtagtcgccgcagacatccatgttccagacttcatcgtcgatctcgtacgggtccaccaccgcggtgagcaccagcggggcgtccatcaggcccccgcgtttgtcaggtaggtacaggcggctgaagttcaggaggacgtcgagtaacagcatgaaggcgtcctcgtcaccgtcgcagttcctgcgtcgggccgcgttgattatggggtggttgtaccagcagttaatgtccgcgattccgactacgcgccccaccacgccgcatgaggtatgcggcgctaaagtgacgattaagtgtccgatcagatcctccggcttctccacgccgtacacgggctcgagtccgtaatatttccgcaggagatcatccaggtactggcagacccggacggcccactccgcggccttcctcggtagcaccacgtcctgcgggtagagctccaccacctgatcctccgagaccacgggatcgccgttgatgtcccgctcgaaccccaggagtctggccttgaacggcgttaaccctacctccttcagcctcacgtgcgtcagcgggcagtcgttacaatcgaagcgtagggtaccatccttgaatacgaagaggtccctcttagccctcaggatacctttctgcaacggttcgggcattttcagcctgctggtcattccttttactcctttgagcgtatcggtagtaccgacttcctcctccgcgcgtcggaccagctccctaaccggcagcgaggaatacgggtcgtcgttccgctcgatgtcggcgcggacgacgggatcgggctcctcgcagtcgcactcgtcagctggctcatcacaccggttacagtactgcacggtttccgtaccgcagaacggacacacccggtacggtaccagccggtcgcactccgggcagatccggtagcagacctcgacgcgatccgtgtcctccgattcccctcgatggaacttcatgatatctcgctgattaccgccggctatgccgatagggaacagtacgtgcggcggtggactcatcttcctctcacgtgccttctccggtctccccatccgggctcctattctcgtcggcgccttctcacggatcgggaacccggctagcttggacacgtaccggcacgtctcgtcccgtatcacgaggtaatccagcaagtagtccagatcctcgtcctgctcgcggaactctccgctctcggggtcgtacccgagctgggccaacagcgccgacgcccagggttcctccaccacgatcgtgtcgtcttcgagcctgtgggggacgagcagatcctccaatatacgcttgatctctccgtcgttctcgaactcgactcgtaggttcccccattccgacccggcgacctcgagtgcctctcggagctcgtctacgtccttcggtttcacgtcgtgccataggaacgtgtacttcgggtggaacggaaccccgtactcgcgcgacagttcgatggcctcctccacgctcatacgctccggggagctgaggcgcggtatcacttcctttctcactaattcgacgatggaacgggccaccttcacgggaccgttcaggaagccgtcgaggttgttcccgttcccggacagcctgctcgcttccttcaccaatcgcttcaatggaacatccttcagcttctcgaagacgtcgttcgggaggttcttcctgaggcctatcaccttgacaacgtccggtacttccttcacccaccactccgggcagtacgccggagggacgagcggatggttgttctctatgaactcacccaccgcgaccaacatctcgcctaggtccagtatctcctcgatctcatccttctcgacgagttccttcgcctctctcggatcgtctagacgtacgaccgaaccgtctcggagctttaccaccggaggctctatctcggtcaccggcagcacgcaagccgccttgcccggccgctccaccttcagctgtgtacctatgactatgaagccctttgtaacgtacatcaacgacgggtggactccgacggccgcgaaaccggtattcctagcccgaccgtatcggagccggaaacctcctttagctgacgggtgagaaagtagcggcctccccgctacgagctcgcccatgtacttgtcgttgggtttgatcttggtcttttcctcctccccttcctcttcgtcgtcggatcccttgttcacgagcttttccaggaactcccatccgtcaattccatacttctcgacgcgtttgatcagcttcggagccttctgacagataccctcacagataaccagaagggcgcctccgcggagttggttagggagatgtgggatgtcacggtgaccttgtacctccacctcctccgtgggttctccgtcgatctcgatcgggatgttcttcgcgactaactcgacctcttcctccgaaggattgtactggaacgaccctaccttatccagatacgtcacgacttcttccacgtatcgacctacaaggtcgtgatcgaagtcgtccgggttgaacctcggtaggccggctacttgacgagcataatcggcgaggagtgcagaaagagccgccgccgtaccacctgcggctcggatcggtccggcgtatttgacggctaagtaacagttctcagggtcgacttctttcccacactccgtgcacacgagcttcggctcctcatgcgggggttccgactcgtcgacgaccctgtggcccgtaccccgctcacggatctcgacggccgcgatgccttccagtggggccgataccacggcttccgtcagcaccgccaggcctattctaaccgcgtaatctatcctcttgtgcagcggtaagtcgcctttgaccttcagctctcccttaattacctcctctacgatacgaaacgtggcttcctcacggtccccgagctcttcctccaactcctccagtcgatccgctacgttttcgacctggagcagaccctccactcgctcaccgatcgacgtggccagcatcacctcgggttccggtttcggatcttccctacgctgtctggccttcgtagcgacgtcgacgaagcgggaagagacctcttccagcgtctcccgatacctgtccaactcctcacgcgctctgttcacaacgggacgtccccttcagcggttttcctcccgccagctacgaccccgcctctccagccttagagggactcccccgatgtccacgattctctcgaacgtctccgaaggtatctcttttcggggttccggctcgtgctcctccttccttttgtctcgctctttctcgagcggaagttcctggatacgtcctccggtatcgaccggcagctcgaactggaacgtctcaactctaatccatcctccaccgggtagcttgatctcctggacgttacgattggtgcgtccctcgcgctccagccgttcgagctccttttccatctcttcacaaagccgcgctatctctcgctccatctcatgcatcgcctcctccatcgagcgatcgatcatcctgaacagcgtacggaacaagtggtcgaacatctcgagattccccctacacgggacaggcgggattcccacactcggtgcagaaggggccttcccaacaccggttcgggcacggtacctgggcggcgctcgcgcacgcgcaacacgcggcgccgaagggggtcaagccgacctcccgagctattctgaggaggcgctccttgatatcgccggtacgcacgtacacctgcttcctgcctttgggtatcggtctgttggctctattaactatttccgagacgtcaaacccggatcgcttcagcctgctcagtataccctcgttcacccggaaacctcccaccacgacaccccgagctccggcgtcgcgagccatccggaaaagttcttccgcctcttcaaggccgactattcccggtagtatcggcctgaagaagaggtcaacggtcaaaccggctttcgagagctcggtgatcgtctctaaccgctcctcgggtctaggggctcgcggctctagcctggaagctttctctctgtccggtgtgagaatcgtgacgagaccgttcagcggaagctccaacctcgcgagtgactcagccacctccccgtcaatcgcggacttcgtggaaaactgcgtgggattacctaaccaccgtgagaacgtcctcaggtactcgagcgttttgtccgcaagctccgggaggaacggatccgtcacgctacccaccgctatgaacgtcccctcacgacctggttcgaaaccccggttgtatagcagggccaagaccatgccttccccggagagcctgtaagggcgggcgcgctcgaatctgaaccccatctccggtatgtaacagtaggaacaggccctgggacacccatgacctgggtgaaccgtgatcccacaaggcctcggacgtcgacgggcgtgggaatctcggcgggctttctcgatctctctccggtcgagacgtgactcgagcctttcgatcaactcccgtctcatttcatcgcgccccaaatccatagcatggtacaccacgctaacgtcggtaccgtcaagtacatcgaacccaggagactcctccgcataacccgcttctcgtggcatcttacggccgccgcggccacggcgacgttgtaagggcatgcggccgccgcacaggccgcaccggccagtgtgatctccggatatggtgttccagacgcgaaagtcgccatcaccgcggtagtgctgccgacgaccatctcccccatgaaccccaccaggaaagtgaccagcggagaccccgcgtaaggcctgatcgcgctggggagttcggaatgagctatcagcgttccaaggaccattaggagcacgatcgaaagcagttcctcccaagtcttccgaagcacacggatgagtgctccgaccattcgagtccatcggggagtcgcgtacaataatacggcgacccacagcagcatccacggttgcacccacttcacgtccagggccttgactactcctatcccgacgaccaccagcccgtagactatcattcccttgatagtgtcattgctgaccttgatcctggcttcctcgcccgcgactcgtaggtaccagaggaaaccggaagctacgcccaaaactaagagcgggcccacgatactgggagatgcgacccaccaaacggccagcaaggaggcagtggtcataatccccatggtcgtcagtaggaccttcgacacccggaggtcggctgtctccgctacagcataaggcaataccagcaggctcggagcgatgcagagggcgacatcgaagctcagcttcttaggatcgatccctgaaactcccgaagtgacgagaatcggtacaccgaaggccgcgaacaccccgaacggagcgtgccccacgagagccgcggccgccgcggtcgtcttactcagtcccgcttcgacgaggagtggacctactagagtagcgggcgttccgaagcttgccacactctcgaaagctccggtagccacgacgcttaggcccaccaagcacgggccgcgcagttggcaggtctccttcagaatgtgcacgatatcctccagcacgccgtcttcacgcatcatctccacgagcgtgaggctggccaacacgacggccaaaatttcaacaccttttagcgcggagtcgacgacccgaacgtagggtacctgaacggtgaacggagtgaatgttgaggctataaggtagagggctaaggaaagagaagacgcgcggaatagcccccagccgcgaagtgcggctacgatcaaagccgagattgatatcagggggacaaccagtgcgagggatggcaacggtaatcccccttctgacgacgatggtgattggggctcagggtctcgacgtctgtataacctcagacgctatcaacgggaatacttccgatctcgcattcctgaaggagttcgcagtcgccttacacgacaaagcccctatctatggcctccggatagacaacgtttacgtgagctacagttccgccaacggcgtggagtacctctacgagctgagtgacaatgaattaaagctgctgcaacagtaccggcgtataggagaggtaccgcgaggattccgcgtctgttccgagctaggtttggacacgctgatctggatcgcaggtagggacgggtcctcgtactacgagcttaagaggatccttctgaccgagaactccacggtaaggcacgtcgtctacgtgaacgtatccccgaactacctggtaaccgatgacccgagcttgcccggatacttcagcgtcaactgttactggaacgggccggacaagatctggtacccctactactacctcaagctactgggtgtcgagatcgtcaacgtgaaggacgtctaccccacttacagcagcacgatccaactcgtctcgttggtggatatactcgccgacgccgctctgaaggcactcactaaagccgttaaacacgagttggtcagccagcagccgcccgaagtcaaagccgaaatcagtcacctgctatccgccttggaaggcccggaaccgccatcgccgtcggccctagaagaggtaatgcgaaaaggtggagcgtccgaagaattcatcgaaagcgtcctagaaggcttgaggaagtactggagcggtagcacaggcatcggaacctcgcagaggtcccctgtaaatattatatacaccgtcctagtgctcaccctgtgggtacggagacgccccggcggtgtagcccggtcaagggcccgcgggtgaccgcgggcccgccgatatcatgcgggactttcgaggcccgtccgggccggagacatcccgcgacccgggttcaaatcccggccggggcaccaaaccgacaatcgttatggaaataataacgatccttggatgatactagagcgactagagcgggctcagtccaaaacctcggcgtctagttcttcggggctcatctccctctctatcctgccgtctcgaagtaggatcactcgatcggcccagcggactaaggagagatcgtgagtgaccatcacaatagtatggccggagtcgttaagcttctccaagagcttcataatgcgttgagaattcttcgtatcgagctgcccggtgggttcgtcggccaagatgacttctggatcgttcgccagcgcccgagcgatagctacacgctgctgctcgccaccactcaactgactcggaaacttgtcgaaatgttcctctttaagtcccactttccgcagcaaatccttagccctctcctcatcctcttctccggctagtgtcatgggaaacatgacattttctaacaccgtaagcgattcgattagattgtattgttgaaacacgaaaccaacgtatttatttctaatttcggcgagttcctcgtcactcagattagtcatatccttacccgcaatttcaacgcgacctgacgtcggtgtatccagagcccccataatgtgaagtagcgttgatttaccagatcccgaaggcccgacgatcattaggaattccccattttttaccccaagactcacccctttgagcgcttctaccttcaccgaccctgaattgtagactttccgaacattttccagtcttattacgtagttcgacatttgaacgccccctactcgtacctgagggcctcgacggggtcaactttagcggctttccacgccgggtacagacccgagaccacccctatcgctaaagccagagctagtccgagccctagtacctcaggcgttataagtacagacaccgtctgatgctttatgtacgacaggatgtggaccagcagttgtgagcccaacatcccgagaacgcaccctatgatcccccccgccagggacaatattatcgactccagtaggaacagcttcatcacgtctctgttcgtcgctcctatggccttcatgacgcctatttcacgctttctctcaatcactgacatgagcatagtattggctactccgagcgctcctacaaccccagcgatcccggtaagtgctatagccgcaagttcaactgttctcaaattattcaacatcccttgaacagccttactagttgtgatggcctcaacaccgtttattcttgactctatttctttccttactcgcttcgggtcagatgtttgaacgaacacacaactgatgcttttccctcgaattttattgacgctatctaaagtagtaatcgcacacatgttagcaagttgcgacgatgttttgaacgctccagatacccttaacttttgtccagataaatccacggtctctcctaccttaggtcgtaattttctccatataaggctcccaaaggccatttcaccatgtttagggaggtggccctctatgggctctattttagaccccactacgagttcatagcccctattttccaccgccgcgattaatataggttgacgttgccggcccactgtaatcatcctattgttaaaccaaacagctaccgtacgctttactcccggtatctttctcacttcatcctcaatactttcatcgagcacactagatagtgggtcgggagcagcctttgattttactatcagtgaagccgatccactgatcgccaccttaacatcatgttgtaatcccttcgcaatcgctgagatacccactacggcagcaactccgatagcaactcccaagatcgtgagtagtgagcggacactcctccgagctatgttcctaatcgccacctttattgtaatcaagcgtccgttccccttatatggattctaatgacttcttaggtgttcctctcctaacaggcctcccgtatattctctttatctcttcagccttaaccgattcaccctcacgttttaccgtaggacggccctcaggttttatcgcatgtaccctaaacaacatcccatcaagttcgtatatctctccaaccgtgaactcttcatccctatctacctcaactttttcagaaatagtgtatcctgatggaagattaattgaaactccaatgcgggctggaatatccaacgatactccccaaaccgatacaacatccttgaccttggctttcttcacgctgtcctcttcatgtgtagctatattcgtaatctccactctttccccctccacttcgatcacatcaccaacttcaatctcttctaacgggtccatttccacttctttgcactctgactcctcgtacctgctgatagtgactttaaccttcttgggagcgtagaacactaacctcacggggtttacggtaccacagctctcacaccgtgcgaggacattcgctacgaacctcggtacacctttctcatcaggccctttccgatgtactgtggcgcggacaacctcctgtggaacttcttcgtcgggagagcagcctttacagggcgcgtatattatcctcccctctacgtccgactcggataagtcctctaccgtagtttcagtatccagggtgatcatcgacgagtacccccgggggaatgcgagatggagatcaccctcaaggcccgaggtcacgaaaacgtgaccggccgtcatcggagtacgttcgaagtcacgaaagatcccgagatcgggccaacggctgactgcataataggtgttcgcgccgacacggcatgcgccgatctgccagaagatttcaagctgatgttacggcgaggagcgcgagtagaagtaattctgcgagccggcggtacggaagacagggtagtcggggtcggacatccgaggatgaccctacaagacggcaggagtatggtgttccggacgagcgactacatcgatgatcgcaccgtactgataaggtgcaacaaagcggcaagggacctgagtcgagacctggttcgggcacttaaggacccggagaccgtcctgatggtcgagatgcgggtactcgatgttcgttagcgttatcataacaatttccggttggcggacccgccgggatttgaacccgggaccacggggttagaagccccgcgctctgtccaggctgagctgcgggccctcctcccaatccgccctctgaggtggtgggtataataaggttgcggaggtcaccgtcgcttcctgccaccccggaactccgggacgaacaacctatacttgtcccgggtctctcctttgagctccgccagaacgcgctctttgatcatgtctcgggggtgcatgcggaggcccttaaccctctccttgatgtcgtccagggactcgaacggttccttctcgcgctcctccaagatacgctcgagcgtttttcggcctattccaggaagaagctcgagctggtgcaacctcggggtgatgggtctagcctcgttgaagaacctgacgaagtcctcctcgttatcctcgatgatcttctcgacggcgtgggggagttcttcacgggccgtcgcggtgagctcgtcgtatcgtagtcgtcggttcacgtggtggatcttgtcacgcttaccacgacctacgtacacctcttcatggagctccaggaacgccccttccttgggggctagctctaggagcacgaagaagtctttccctatcgcctgcgccacgggctgtcgcttatgaggtggctcctccgccctgccgtacggtaggaagtccagtatcagcgcatactcttcataggcccgtttccccttcggctgcttgtacagtatctccaccatcgtttactcctcctccgcgattcgttcagatacctccaagatagcacgcactacatcctcatcggcacgacggaggagacgttttccggcggactcgagcaagactttgatctcctcttcactcctaggttgaacctccagaatcttgttgacgaggatctccaccgtgcgctcgttggtcgtgagatcaccgagaatagacctgagctcctccttcgcttcctccaggtcctccggctccagcgatccgaacttcttcaggtaccgaactgcctcgcgctggtcataggtgagttccggatcccgctcctttaggaccttctctaccactttgcgagcctcgtgtacgttagtcggactccgttcccgggcctgaagggatatcgagggcaaggccggggacccctatcactggagttcaggctgctcctgtggcttcaaatgctcggggtacactatcagtttcttctccttccctccatccctgatcttcacgatgtaagctcggccttggcgtcctacgacttctccagttctcccgtggtacctgggatggggcatgcctttgtggacactgggatcgattacgatgtgtactttctgaccctcctcgaactcctgcgtcatcggacccaacggggaaagaccgcgctctctaggcttctttcggagttttttccgtgtacgactccggaaacctttggatcttctcaccaactcaagctccccccaactcgtacaatacgacggccagcgcggccagctctccgacaggagcgctgacaccgacggtgagatcaggctctatatcgatctcttcgagtagctccacggggaccgtgagcagcacgtctgacggctttaatttcttgatcccttcatctgccgagggatctagcagcgccacccgaccatcaacaacttccagggcgtcgtccaggtcgtcgaccaccatcaccggaacgcgacctctctcctcggggtgttccagcacctgtgtgataccgtccaaggccgcacgtgacttcggttccgaataaacaaggagcttcgccccgaggttgcctgcgataagggccacatggttgacgcggaagtggctgaagggacggtggtacaccacgacgaccacgcctcagcaccccgagaacgggcaagtgaggatggcatctatggccggtagtcgctccccggcgagcattcggagcatcgctccgccacccgtgctgacgtgatctatgctgtcataagcaccacaggctttcgccgccgcaattatgtggcctcctccgatcacggagaaagcctccgaatcggcgatagcattgaggacctcgtacgttcccttctcgaatccgggttcctcgtacacgcccatcggcccgttcgcgaccaccatacccgcgctttcgacctccttgcgataccgttcgatcgttccggtaccgatgtcgaagacgggagcgtccgctggcagttcgtccacgtctacctcctcgcgctctccaccgcggttgagagccacgtcttcgggtacgaggatcacgtcgtcaccttcctcgaggagctcccgtgcctcgtccaagtagcccgtgtaacccttcatatccaggaatttccgtgaaggtttccctagatccactccggaggcccaaaggaagagattgcccacgagacctcccagtaacacgcgacgtacgttgtccatctcgatggctcggcgtatgaccttgatagcatcctcgatcttggaccctccgatcacgaagacgccgtcctccatctcgtctctgaccatggtttcgaggacttcgatctcgcgctccatcacacggccgacgcaagacggaagtcttcgagtgaacccgaccagtgaagcgttcgagcgatgggccgcagcgaaggcgtcgttcacgaaaatgtcgaacagcggggccaggttccgcaccaaatgtcggcgtgcgtgccactccgggtcccggttgatacgttcctcggaatagaaccgcacgttctccagcaggataacttcgccgggctccaacgaccgaatcttcttcttcgcggtgggtccgaacacgtcgggcacgtactcgaagttgtcgagttcttcggacatgatttccgcatgtggttccagtgtcgtgaagtcatcctcacccggtcttccttggtgtgctagaatggccaccctggcgtcgtgttccattaactccttgatcgtcccgagatgtcttttaatacgttcatcgtcctcaattttaccatcgataaccgtcgaatttatatcaattcgtaacaagacccatttattttcgaactcgaaatcgtccatagtagatatgttttcgtacatcactgttcgcccctaatattttattgtattttagcgtgccgttcccacatatctgattcatcgactcctaattctttcgcgagctgagccgtaaatccgtccaagaatgacagcattaacatctccgagaatgtgcgaagaattatctcttctggttcaggaaggacaaccacaacatccgccttttcagctattttcgagtccgcattcatggttactgcaagcacatctgcaccttcgtccttcgccacatccgccgcataattgacgaacgcggtgttaccggaaacgctcagcgcgatgaggagatcgtcgggctttattgcccgctctgtgctgtgaccgaccacgtagcatcgtgcgcccatttgcacgagcctgacggcgaagcactcaccgatgagtcccgttctacccattcctacgatgaatatacccctatcattccgtatcttctccacaactaaatccaaggcttttttaacatcttcttcgggcagattgttgcacgcatactctattacctcggcctccctccgcataattttacgtatgcgatccaatgcccatcatcccctattctaggccggagatgaggtctaataacgcctccttaggatcgtccgctaataccactccagaagctactaagacgccatcagcacccaattccacggcggcacgcacatcggacccatcggtgatcccggccccgcacagtacggccgtctcctccgagacctccttcacgacctcgaccgatcgctcgactacctcggggtcggccttcgacaccggggtccccgtaccgatgagctccggcggctccacggccaccgcgtgaggcgagagggccccggccgcacgggcggcgagcgcgtcgctcgcacacacgatcgtgaggagaccctcgtttatgcacgctcggcagacgtccttaagatcctccaacagcatccggcgttccgagtggttcagaagcgtcccgtcggcgccggcttcgaccaccatctcgggagtcacgtgcccggtcctcccgccgggctcggccgcatcaactgcctgcgctaggaccgtgacttcgtcgcctacctccctaaccacgtcgcgcaggtcgacatgaggaggacagatcccgacctcgactccggtttcttccgacacttccgcggccactcgagccagtcgtagtgcgttctcaccgaccgcttccgagtacgccttgaaattcacgataacaggaggtacacgcaacatctcaccccctacgacctcccgacgatgatcctatctaccttgtccccggggaatacgccgcattcaactacgccgggaacggagttcaactcgcgttcgagctcggcgggatcccagtcgtccacatgcaggtcgacgatgggattacccgagtccgagaccacgggcccgtacttctcgtcacacgttctcggtctgacctcaccgaactcctccagcgtccgaactgttaactcgtagcagccgcggagtacctcaacgggtaccgggagctcccagaggttctcgacgagcttcgactcgtccacgacgacccagaactcgtcggcggtgtaatctatcgccttctccaacgagtggcaggcccctcctcctttcagcaggttaccatcgggatccacggcgtcagctccgtcgatggcgaccgggagctcttcgggcggtatcgtagtcacgttcagtccgatgcggcgacaagcatcgatcgtgccgggtatcgtggtgaacaccagtacgtcggcctctctcttcaccagctcttcaaggaaagcctcgacggtggtgccggcaccaaccccgatcacctcgtacccgcgtcggcagacctcttccgcggctttcctggccgcgttccgtttgccgctcaaagccgaacccccgagggtttcttaatgcggcgtgtgggccctcacacgcgggtagccggacgatgtccgataaagtcctcgtgataggtgcgggccctaaccgcatcggccaggggatcgaattcgattactgtacagttcacgccgtgtgggcgattcaggaggagggttacaaggcgatcatagtgaacaacaaccccgagacggtctccacggattacgatacttcggataaactgtacttcgaaccaatcacactcgaagacgtactcaacatagtcgagaaggagcggcctatcggcgtgctgacgcagttcggggggcagacctccgtcaacctaaccgtgccactcgcggagcgtggagtccgtgttcttggtaccgatcccgacgacgtcgaccgactcgaggatcgggacaggttctcaaagctcctgaagaagctcggtatcccgcagcccgagagcgggaccgccaacgaccccgaagaagccgttgaggtagcggaagatatcggttacccagtccttgtgcgtccatcgtatgtgataggtggccgagccatggagatagtgtacgacgaggaggatctccgtaggtacatcgaggaagccgccaaggtatccccggagcacccgatcttgatagaccggttcatcgagggcggcatagagtgcgagatcgacggtgcgcgggatgaggccgggaacgtgctcatccccgggatcatggaacacatcgaggaagccggtgtgcactccggtgattccgcctgtgtcgtgccaccacagacgctcccggagcacgcacaggagacggtcctcgagtacgccgaagacatcgccgagggggcaaacgtgatcgggcttattaacattcagttcgtctacgaccctgaagaggacgaggtgtacgttatcgaagccaacccgcgcgccagtcgaacggtgcctttcatcagcaaggccgtcggaataccactcgccaaaatcggaaccaaggccatcctcggccgtgagatccccgaggtcctggacgagatggggctagagcctccggacggtgaccccggaatcgtcgccgttaaagaggccgtattctccttcgagaagtggcccggagtggatcccgtgctgggccccgagatgaaggctacgggagaagttatggggatcgacaggacgttcggtgccgcctactggaaggctcagctcgcagcaggacacgagcttcctctcgagggtaccgccgtcatatcggtagccgaccgggacaagcccgatatcgtcccgatcgctcgaaagcttcagcggttagggttcgatctgctcgcgacgcgcggcaccgcatcgcacctgcgcgaacacgggatcgagtgcgaggtggtgaggaaagtatcggagggtagtcccaacatagttgatctcatccgtgaaggtgaaatcgacctgattatcaacaccccaacggaagggaaggacgctcgccgcgacgggtacgccatccgtcgggcagctgtgaagttcaaggtcccgtacatcactacgatcgcggcggcaaaggcggccgttgaggcgatagaactggtgaaagagaaaggagtcaccgtcaactgcctccacgacatccacaagggtgattggacacctcgcgaggtgaaacccgaagagttgactcgctacggaggatgatgggggagagacgtgttgatagtcctcgccacatcggagggtgtcaagctgggtcggcgtctcgcagaggagctcgacgcggagctggcgccggtcgaggaggacaggttccccgacggtgagcagattgtaagggttcctccggagctcgacgggacggtagtcgtcgtacactcgatgagcccaccccaggacgagaacctcgtgaaggcgataatcactctcgacgccgctcgggagaacggggccgaggaagtcatcgccatagtcccttacatggcctactccaggcaagatcgtagattcgaacccggagagcccgtttcgttccgcgccgtcgctagggcagtgtccgcgaacgccgacgctctaataaccgtcgacctccacgagccgggcacgctgaagtacttcgacgtacccgccgagaacgtcagcgcggctgaggagctgggcaagtacctggcagaaaggttcgagggagaggatctcgtggtcatcggaccggacgaaggggcccgagaactggcccgcgaagtcgcctcgatatgtggggttgaatacgaccatctggagaaaaagcggctcagcggggacgaggtcgagattcatccgaaagagctggacgtcgaggggcggacggtggtactggtcgacgacatgatcgacaccggagggaccatggttgaagccgcccgagcgcttcgcgatcaaggtgccgggacgctctatgccgcgtgcacccacgcgctcctcaccaggaacgccgccactaggcttttggcctcaggattcgaagatatcatagccaccgacaccgtccccaacccgttcgagaaggtgagtgtggccccaccggtagccgaggctgttgagaatctcagcgggtgagacccgggagaaacacttaaaatcccgcctcatacttgtgcaagtgggcaaggcgccggggcggccgagcccggtccaaggcgcgggactgctaatcccgtggcccgtatgggccgcccgggttcaaatcccggccccggcgccaacccgaaatcgttataaaacctataacgatctacgacgagggggacacccgttgaccgaactacaggtcggagactacgcccgatacgtgcggaccggaacggtaggcaaggtggtcgacgttaaggagcgtgaggatggtcgatggatccagctcgactcaacaggactgtattatcacgaagactacgtcgagaaggtggagaagaaagagtcaaaggagaaggaagagaccgacattgaagaagtcgttgagaggattagggagctcaaggaggcgttcgaacacgtcgacgagcgggtgtgcgagggaggcggttaatcaccttctgggtcggatcttcgactcgtccactaaaacgtacttgcccaccgccagcacggagctccacggaacctccacaacgtcggccttcacctgctgagcgtattctttcgacggttgcaccagcaacgctttgatgcatttatctttccaggccaattccacctccatgacggtacccaagtcgtggccgcggtttgtgatcacgtgtcgctgcagcagttccgaaaccctcatctcgtttttagcgcctgaagcccctgggcccgctcctctctcgggcaactccgaagcaccccttccaccttccggagatcgtgccacgtgttaacgttgtaagccaaccgtggctcgtccagcaggagtttgaactcatcggttttccgcagaccccctactacgtttaatcctacgaccaccgcccggacgtttcccacagttgactcgaatctccgccataggctcagtccggccttcacgatcaagcttcggggaacccagacggagagcgaaggctccgggacggccgcccatgcggcgataaccaggcccacgatgtctggggtcagacacggcaaatccgcggtaacagttagtgccggcgtccctacgctctctagcgcgaacctcaggtcgtggacgtacccgtctcccggggtgacgacgacctccgctcccaaccgctctgcgatggaccgggtaacccccgcgtcccgcgataccgccacggtgatcctatccacgcaacagcaatcctgaagtgcctcgagcacccacacgagcagcggtttacccgccacttctacggccggcttctccaccccacccatgcgcttcgcccgaccaccggccatcaccagggcagggagcttaggcaaacggcgctcaggacccgtgacacccatattgacgcacccaggaagtcaccgttcacgccccttatggtacggcgtgccgcctccaggcaggtccaagcgaccaccgccgagcagaccgcacatgttagggtggctacgggtgaaaacggcaatgacacgaccgttgataggattcctcccagcaatacctgatcggcgtccacgtactccgtgaacaccctaccggagtagctggcgggcgcgggctcacccaccgccgccatagggagtacggtgaaacgtgagaacacctcgatgggtaccagcacctcgaagggtatccacccgaacgacgcgaccgctaggaggagtgccatagacccaatcgctaagccccccactcctaccctcggatcacgcatagccttcgtggcaccttcttcggagatcacgcccgccatcagcgcgtcgcccacatctacgaggccatcgaagtgctgtgccccctcgagtacgagcagcgtcaaaactaccaagcaacctctaaccggtgttccggcgaaggcccacgccacgacccccgccagcaacccgctgactagtccgaccgctggaagccctaaccatgcctgctcgccgatctcacgcggactcttcgggtgttctccgatcggaaggacggtcaagaatctgaagactttcaggaactccacccgaatcaccccctgcggaacgcggcggtcatggcaccggcaacgagacctgcaaggacgtcatccagcataacccatctctcatcgacttccttcaggattccgggcttctcctcgtcgtaccgtttgaaattgaacagcgccccgtaaccccctaactccatagccacaaactggcctaggacctcatcgaagtacacccaacccgggtcctcccgtagttcaccgcactcctccggataagtgcctaatcgcacgaatctgtcgatgagtaacgccgtgaacactgccaaggccacgttagggttctccagaccccgctcgagctcctctaggaccctagaagcgtgctcctccttccactcacctacgaacaactctcgaccggcctcgacgaggtcgttcagttcgatcccctcctcttcgaggatcgtttttatcgagcgtgttggggaataccctgcgcgctctcccgcagtgaccacggcttcctcgaccgcgctcatcaagcgccgaccgagctccgtggcgggtccacagaaagagtccagttcatccccctgtggacacaacacggcgacggagtccgtagtcgtccctaagcaaggtccttcattacccaggactatacgcaggaccccatggcatttcgcctccacggcccacgtcagggcctcgaccagggagcgtgtggtcaggggtcgccctaccacggcgatcacgttcacggtcccgggtcctcctaagtcgtgctctttagtcttagagcagtaggcgttaccgaacccggcggtcgcaacggcgaagacgtcacccttttgaactatagcggcctgctcgacgtcggcggccgtcaggaacgccagcgtgtcctcgggctcgagtcccagttcgtggagtctctcctcgacgtagccccaaggatcatcgtgcgaccatcccttctcgacccggatgttggccacccacctcacctcgcccacaccgtccgagtagaatgcgctcgaaacgtatttcacggggttctcgaactcaagcaccaccgcccgctcgtccttgatcacgtgaaagaactccacaaacactcccccagggagtggtaccgtggccgaggccgagaggccggccggtaaggagtacacaaccatatctgaagtctccggaccactgatggtagtcgagggcgtcgaaggtgcgaagtacggtgaagtagtcgaagtggagacacccaccggcgaagtccgacgaggtcaagttctggaagcccgtagggacgccgccgtcgtgcaagtcttcgaaggtacctcgggtctcgacaccacctcgacgaaggtcaggttcacgggagagacgctgaggatccccgtgtcgaccgacctgctgggacgcatcctgaacggccgtggtgaacccattgacggcggtcccgagatagtaccggaggacgagctcgacatccacggggccccgatcaacccggccgccaggaagtacccgagcgacttcatccagaccggtatctccgcgatcgacggtatgaacaccctggtacgtggtcagaagctcccgatcttctccggttccggtcttccgcacaacgagttagcggctcagatcgcacgccaggcgaccgtcccaggtgaagaggaggagttcgccgtagtgttcgcggccatgggtatcacgcacgaggaagccgcgttcttcaggcgagagttcgaggagaccggcgccctggaccgtgccgtgctcatccttaacctcgccgacgacccgtcgatggagcgaatcatcaccccgcgcatcgcactgacggtagccgaatacctggccttcgagaacgacatgcacgtcctggtgatcctgacggacatgacgaactactgcttcgctcctggtaccagggtgatcaccgcgtccggcgacgtcgtcgagatcgacgagatcgtcgagagggccgccgaaaccgccgtcgacggtggtctgagggaaggatcgacggaggtcaccgtcggagtgaccaacgtcaggacactggcggcatgggacggcgacctaacctccaacgacgtggtggccgtggaaaaaatcgaggccccgagccgcgctgtccgggtgagaacgaggagcggcgccgagctggtggtgtccgaggaccacaagttcctagtggacacggaggatggccccagaatggtcgaggcgtccgagctgaagtccggcgacgaactgtactccgtgagggaactccgagtcagtgagaaggttccgacgtacctggaactgctcctggaggcggaggacaagttctacgtgcacccaaccgaggagttcgaggaggccgtggccgagcggtacgggagcctggccgaagcgtgccgggagaaggagctcccctacagggccagggaggccaaggagcggaggtactacgagctgtccgagttcgccagactggcgacggctgtgatcgagagcgtcgatgaggctacggagtacatcgactacgtgaccgccggaggtaggaagagggtgaagttctcgtcaccgaggcccgggaaggaggtaatgtacgtcgccggcctgatagcgtcggacgggagcgtggacaccgagcgagggttcgtgatgttctcgaacacggagagggagctgctgtcagcgttcgaggagatcgtgacggaggaattcggcgtcgatgcctccaagacggagaaccagaacggcgtgacgatgctccgggtcaacagccgcgtacttgcccgggtgttcgagagactcgcggacccgaagacggtcctgaagatgccccgggagctcgtcgccgcttacctggccggctacgtggacggcgacggtcacctgaaggacggcaagatcgtgatcaccacggccgacagggagcgggccggggacctacagctcctgctgaagaggctcggagtaccgagcgtgctgcgtgagagggacggtgcctacgacgtcgtcgtaaccggtcacgacgccgcggagctggccgaggagctgccgctgaggcacccgaagaaggcggaagccgcggcgtcgatgtcgtccgggcggaggtcgtccaggttcgacagggtgtcgcgcaggttcggcaggctgctccgggaggttaggaggaagtacggcgttagggcctcggacctggggtcgtccagcacgatctcgcagatcgagagcggtgagaggcgcgcgacccggcgcctggcgctggagatcgtggagaggctcgaggaggtcgtcggcgacgttgaggaggtccgcgagctgcgggagctcgctgagggtaactacgtgctggacgaggtagtcgaggtggagaccgtggagtacgagcacgagtacctgtacgacgtgaccgtggtgcccgatcacaccctggtggtggagaacggcatcatcacgtcgaactgcgaggccctacgagagatatccgcggcccgtgaggaggtcccgggccggcgcggctacccgggatacatgtacacggacctcgcgaccatctacgagagagccggatgcatccgcggtcggaagggttcgatcacccagatgccgatcctcaccatgcctcacgacgacatcacgcacccgattccggacctaacgggatacattaccgagggtcagatagtgctaagccgagacctacaccggcgcggtatctacccaccgatcgacgtgctaccctcgctgtcacggcttatggacgagggtatcggtaagggtaagacgcgcgaggaccacccggatctctccaaccagctgtacgcggcgtacgccgagggtcgcgacctgcgcgacctagtagcggtagtaggcgaagaggcgctgacggagcgggaccgcaagttcctgaagttcgcggacgagttcgagcagcggttcgtgaagcagggccgcgacgagaaccggagcatcgaagagaccctcgacctgggatgggagctactggcgattctaccggagcgtgagctcaagagggtcagcgatgagctgatcgagaagtaccacccgaagtacaggcagaagaaggaggaacaggaagagtaaggctccctccggccccatctccactcaaacctatctaggtgggggatacccgtgacccaggagatcctagaggacgtcaaccctactaggatggaattactgaaactccaggacagaatcgaacttgcgaagaagggtcacaagctgctcaaggagaagcgagacgccctcatcatggagttcttcgagatggtgaagcgcgcctccgagatcagggagcaggccgtcaagaagttgatggaggcgtacagcaagctggcagcggccaaggtgaccgtcggtgagatcggagtggagcgcgcctccatggccaccggcgaggagatcaaggtggacgtgggatcgaggaacgtgatgggtgtagtcgtaccgatcatcgagcgcgtgagcgaagatggcggttcaaaggtcgtctatggcttcgccgacacgtccggcgcactcgatgaggcgatgcgagccttcacggaggctatcgacgccgtgctggagctggccgagatcgaggaaaccctccgtctcatggccgaggagatcgaacgtactaagcgcagggtgaacgcgttggagcatatagtcatcccgcgcctcgagaacaccgagaagtacattgagatgaaactcgacgagcaggagagggagaacttcgtacggctgaagcgcgtgaaggatctaatcgaacggaagaagttgaaagaagaactcgagcgggtcgtcgaagaaggggccgaactcccatccttcgagtgaggcgcgggtgagtagagcatggtcttcgttagcgtcgccaagaggaaggtcactgagcgtgtccgccggcgccgcgagccctacgacttcaaaaccgacatgttcgagggacggttcgagccactgatagcggccgaggatgtgaccgtcgaggaaggcgaagacgtcatcattaaggtcgaacccattgaaatccctccccacacaatggtgctactgtcaccgtacgcccggaacccctacggtcacgttctagccgtagccgaggagtttcccaaaatgatggaactgggccggaaggtggagcaagtatacttcgccgccgtaagacacggtcgaattcgtaagggcgacgtgctgggagtgctcatactgatcgagctgaaaggtgaagagtgatgcgcgacgagtcgcgcctcgacaagtacgtgatcaaggaaatactccggatcaaccggcacctgccccgacgtcgtaagaccctcgaagagctgttgagggaagagcggccgcacgtggttaaccgagacggtaccaagcactacttcgaccgggatgagctggaacgcctcgccgacatattgccccgctaccttcacggtcgcctcaagctcccgatactcatcgaacttgggtactcgggagcagcggtgatccgtggtaaggcggaggtccgggtagtgtgtgaggtgctcggtgaagagtggcgattttctcaagatcgagtggagctgaacatgctcgacgttcgaaagctccgccgcgaattccccacggcgacccagtacatgttcagtaccgagtacattatggggaggccgaaagttgagagaagaggataagcggaggctgatggtggctctcgttcgagttgcccctatcgtggcaacggtaaccctgatcgtgggttttacggtgttcgtgatactagtgttgacggggcactccggaaccgtaacccgttaaactctttcgaaactggagtcgccggaaggtcgccctacgacacctaaaacctaaagatgacctcttccctggaagctattgcccctgcatgtaccaaggtcatatgggggagaaccgtatggccgtggagctacccaaggctgccatcgagaggatcttccggcagggtattggtgagagacggttgagccaggatgcgaaggatactatctacgacttcgttccaacaatggcggagtacgtagccaacgcggctaagtccgtactggacgcttccggcaagaagacgctgatggaggagcacctgaaggcgctggccgacgtcctcatggtggaaggtgttgaagactacgacggtgagctgttcggccgagcgacggtacgccgcatcctgaagcgagctgggatcgagagagctagctcggacgccgtcgacctgtacaacaagctgatctgccgtgccacggaggagctgggtgagaaggccgccgagtatgcggacgaagacggcaggaagaccgtacagggagaggacgtcgaaaaggccatcacgtactccatgcccaagggtggagagctctaagcctttcttccccccggccgaattgttatgagaacttgaacgattcgcgcgacggcttagctccagaggaaacgccgtatctccctggccttccgttcccctatccccttaacgcgtttcaactcagatggactagcgttcacgacgtcgcctatggatccgaactcgtccaacagcctccgagccagctccggtccaactcccgggatacatgacaacatctccacccgaagatcctcggttgacctacgcttccgtggcctcggcctctgtcgctcctcgaaccttttggccatccggtagagtagctccgcagtttcctccggtcccgccgactgaagcacagagattccgaagtcgacggcgagcgtcgccagtgctccatcaacggcttccggctcgatctccctcctcgggttcccctccacgataattacggcacggtcgaactctcgggtcatctctcgagcttgatccattaacctaccgtccaggagagacctggcgaaatcggattccgacttgcgctccacaccgacgccctcacctacgacgtagtccgccagttctaacgtgtctctctctaggaccacgggctttctcctgaggtgctccacaaccttggtgttgagttcacgcgagtccactacgatgacgggagccctgctcggtggacgcacttcatcgcgctcgcgtttgctacgacccccacctacgaactgatctagcgtcttcgccctcgaacgcaactttctgaggtttttgctcgtagcggtcgtcttccctttcctcttccgcaaccactcctgcacgcgcatcactgcctccaacatcttcttctcacgacgcctcgcgacgtgaaagtagatctcgtccaaggtgggaaaggaacctctagcgacgagaacgtgagcgttacccacggcaccatccctcgcggtacgtccgatccgctggatcgtccttatttccgagggaaccggctcgtacagcaccacctcctcgcaggtcggaaggtccagtccctcctcccctacgctcgtcgacacgagaacacgacactctccccgtttgatcgattttatgacgtccagctgctcgtgctccttcatgtgttccttgccgagcaacaccccgacggatatcccaatctccttgaggtaatcggcgatcagcttggcggtgtccacgtattgcgtgaacaccagcgcggactcgacgtctttcactaactcctcaacctcgggtagtttcgggtgatccggttcgtcccggagtgacgccgatttgcactctcgtacggcgcgctggaagttcggatctccgagtatcctccgtagcgaggaaccgccgctcgaccgtttgcgttccgtaaggcgctcgacgtaccgtaggaaaggttcgattccttgggtttccaggatctccctcgccctagctatccggagggcttccgctacgactccgagagctcgtgagcaccaactggcgcgttctcggcgcttcgccatctgttccctgatctcctccctgagcgacagcagctttcccacccacacgttacgcgaggattgtaggaaccccatgtcctccagtaactccagcctgcgctcgaaagcccgctgcagctcccgtctagcgttgtcgaaccattccggcagttcgacgtcaacccactcaactttcactcttcctaagtactttttaacgtctggatcctcctctgttttaactataatgcgttctatcccaagattttgcactacctcttttatgcgtttcacatccgatccaggcgacgctgtaaggccaactttcaggcaattaaactcctttgatacatacacatatgggtaacctccaaccgctctatgcgcctcatcaaatatcacaacggatgcctcatcagggtcaattctaccctctataatgtcattgcggattacatgcggtgttgcaacaattacgtcggattttttccactcgactttccttcgttccggtcgcaccctacccgtgagtgctttcacgtccaatcctcgtgtagctcgctctatgaatcgggcgtgttgattcactagcggtacggtgggagctaagaacacggcccggccttcgtccacgagttccgagagtaccatcacaccgatcgcggtcttacctagcccggtgggtatcaccaccagagtgttgtccattgaatcgagaatctcggctgctacggacacttggtactcgcgacgctccaggaagttccaattcacccgtctccatgcaggcattcccggatcacctcctcggcccgacgccggaactcccggacggccttttccggatcctccacggaggacactatctcacggcgcagttcactgagcttgcgccctagctcttgggtagccgcgcctgtctcggagagtcgacgcatcagctcccccataacctgacgggtgcgtacgtcgacttcattcacggaggaggggtcagtgcgccgacgtcgctttttgggcttctcgacgcgtagacccgactcgacgaactcgagaacttcctcggaaacccgagaatcgtctagaaccaaggtcgcacgctcccaccaccgatccggctcgggtggttcaaacctatcataaattctacgaacgacctcctccgggataggttcacctcgctcgcggttcctacgtaggcacgtatctaaaccggtacggaggtacactatcccccacggaactttcctctccaaggccaggagagccaactcacgccgcatgctggaatagtaattagtgtcgtccgctatcaccaggtctagctcggcgtccagacacgtctcaacggacttcaaaaagagttcccgggccacctgctcgagtttcgggtcgaactcatcccataggaatccgcggagagcgtccgcctccacatgggccactcgccagccttcctgccggagttcccgagccagctcccgcgcgaaacacgttttacctgacccgggcgggccggtgagtatcagcagtcgcaacctttgtaacccccagggggtctggtgatgggcatctcggagaaactcgggctatcgaagggtcagcggtacgtcttcttcggcggtaaaggaggagtcggaaaaacaacctgtgccgcggccactgccgtgtggctatccgaggaggaagggaaggaagtactagtggtctcaacggatccggcgcactcgctctcggacattttcgatcagaacatcggctcggagcctaccccgatcgaaggtgtagagggactcaaggcgatcgaaatcgatccggagaaagctgcggaagagtacgtcgaggtgatgaagcgagtgtacgagatgtcgaaggataagggaatggaagacctgttcggaggcgaagacctgctcaaagagcaagaggaactgctgaaatcatcgccgggtatcgacgaggcggcggcgttccagaagttcatggaactgatgaaggatgactcgtacgacgtgatcgtgttcgataccgcccccacgggccacaccctgaggttcctctcagtacccgagacgctggaacgccaggtgaagacgatgatcaaagtcagacggaccctgcgtcaagtcagcaagatgctgaagacgctgataccgttcgccgactcggatgaggacgaagaagacgagatcctggagaatctggagaagatgaagaaggagatcgaggaaatacgagagaccttaagcgacgcatcgctgacggccttccggctggtgatgactccggaagagatggcaatttacgaggcacgccgcgccctacgtacgctgaaccactacgagattcccgtcgatatggtcatcgtgaacaaggtaatgccgaaacgagcggacgagtgcgagttctgtcgcactcgtcgtaagatggaagagaagcgtctcaagctagtggagaagtacttcggagacaaggagatacaccagattccgatgtttgcggaggaagtgcgcggtctggggaagatccgtcaagtcgccgagatactgtacggtgaaccggcctgagggtcagcgtcttggtcaggaagccgaaaaagttcccgaagcgccgatacgagctccacgcccacacttacctgaccgacggtgagctgctaccggctgagttcctacggcgtgcggaagagctgaagcacgaagcgttagtgttcacggagcacgtcgacccgtccaaccttgaagacgccgtgtccagactcgccgaggcttgcgacgcgcttcgaggttactaccggacggaacccgtacccggagccgagttgacccacgtgccgccggacttgattccggagctcgcggaggaggcccgagataacggtgccagagtggtcctcgtacacggggagacacccgcggagcccgtcaagccagggaccaacgaggtcgccgccagctgtgacgccgtcgatgtgttggctcacccggggctcatcgatctagaaaccgccagaatggcgtcagagaacggcgtcgcactcgagatcacaactaagcgcggacactgcctcgctaacggatgggtggtccgagttgctttagaaacggatgtcgagttggtactgaacacggacgcacatctcccgggagacctcctgaaacccgaggaagccgccacggcggccatgggggcgggacttccagaaaaaatgttgaaatgggtgctcgaggaagtgccgaggaagatcctgaaaaagcgctagcccttgaccacaccgatcggcctgagtctcacgacggggtccgagattccagcctcagcgactgcccgcaccacctcatcgacgtccttatacgccggaggagcctcctccgcgaccaccggcatactcgcggccttcaccaggatcccctggcgctcgagctccctggccacatcctcgccccagaacttccgcttcgccgcggccctgctcatggtacgtcccgctccgtggcaggtgctgccccaggtctcttccatcgccttctccgtgccgatcaggatgtacgagcccgtccccatgtctcccgggatgagtaccggctgcggcagtccctcgaacggtacgggttctccgtgcttcttcagggcctcctccgagaaggctcgggtggcgcccttcctgtgtaccaccagccaccgctcctcgccgtcgaccgggtgcttctctatcttggccatgttgtgggcgatatcgtaaatcacctcgatacccatgtcatcggcgtcgccgtactcgtctccgaatacctctacgaacgactctctggtccagtgcgagatcatctgacggtttgcgaacgcgtagttggccgcggcgttcatcgcgttgaagtacctcttggcctcgtcggtacccatcgcggcgcacgctagctggcggtccgggatcctcacgccgaacctccgctctacgtcacgcatggaccgctccatgatcctgaggtggtcggagcagacctgatgaccgaatcctcgggaacccgtgtgaaccatgatggtgacctgtccctcctcacggattcccatcttctcggccgcttccttgtcgtaaatctcgtcgacgacctgcacctcgaggaagtggttacccgaacccaacgtacccagctgcggtcgaccacgctcgatagcacgcttgctggcgacgtcgtccctaggtccgtactcctcccaaccgatggtctcgtaagcgtgcgtcatgttaccgcgggattcgatgtggtcgagatcctcatcgaacccgaatccctcttccacggcccactcggcaccgtacagcatgacctgtcggagctcctgcgtcgacagacggacgcgacgatgccgcgatcccaagccggcaggtacgttgcggaagatggtctctaagagctccctcagcttaggccgcacatcgtcttcggttaagtcagttttcatcactcttacaccgcagttgtgcaccacgacaccatcggcgatgaagttgtgagccccgtggcagacgccgatgtcgtagaacctgtcgtactccggctcgaccccctttacctccaccacctcctcgattacgaacccgccagcgagtaccctttcctccttgaacctctcgaacgtcgggaagtcctcgggcaccctgacgctcgagattcctccgtcgtagaccaccctctcgacgaagcgcctgttgacgacatctgcgacggcttcgtgcgccttcgtgatactccccgtttcttcgtacacctctgcggcggtctccgcggcctcctttcggtctttcttgacccgctccttgagtttcaggtacgcgtaggcggcgagcccctcgaccttcttctccggatcgtactcgtacccgaccttcccgaggaaccgcttgatgttctcctcaccgacgatggccagtttgtagacgacattcttcttcgacttcacctcgtacaacgtcgtctcgattccgaactccctcaggagcttcgcgacgtcgttcatgaactcacgtaggttctcttcgagctcttccaccttcgcttgggtcagattgatcggtaggggcgtgtagcgcttgaacttgaccacgctgccgtccgccgcgaagagacccgccaggaagttcctcttgacccacaggggagcctccttgatccaatcgggcaccttgtacggtgtctcgaccttccgacccctcggcatgcccagcttctccatcagaagggcgaaggacctcgatgctaccctcagctcgaccgaggtcgcttcgccctcgtagcgtccgctagcggtttcgatctcgtacctccgcttccggacgtggaggttggccttcacaccgaggctctccaggtctctcttcagctcccgaagcgttctctcgtcaccgtagaaagacagcgtgagccttccggcctgctcgcccagatgaccgtcgcccatggcgaagcccaagatcctagcgagcgtacccaccttgggatcgctccaacgcagcggaatcaggtcacgttcctcgaggtacctcagaacttgcgggtctacatcctcgaagtcgctttcgtcgagtatcgtcccctccttctcctcgtattccacgccttcgaacgggtatacgacgaccaggtctccttcctcgatctcacccagctcgacgtacccctcaggcgtcaggaccgggtggtcctcgctaccctcgatggtcaggccgctctccgtgacgagcactactgccctctcgtcctcttcgattccacgttccatcacgaacttaatctccgagtcgtcctcacgcccctcatctacgtcgtacaccttcagcttctggtctgtcaacatcttcgggaggtcctcaactttcacccaacaaccgtgctcggtgaggatcttcgtacccggtgctaagcagttaatatcgtaacccacacctccagggcttacaactccctcttcgacgtcgaatgctgcaactccacctatcgggaacccgtatccgtagtgggcatctggaagcgctattgagtatccgtaaatgccaggtaagcaagccacgtttgcaacctggtcgaatacacccttctccattccgtcgatgagcttctccgttgcgtagatgcgacccggaaccttcatacatcccttatagtcctcaggtagttcccacacgacgttgttgcggatgtgcttcagcatcgacttcggggccacggtgtttccccctttatggcgttacgattcgacttgccgactccgcttccgccccctcccttaagtatcgaacggccgttttcaacgcttcgactaagtgctcaacttctacccccggcacaccgtgcgcgagtaggagcacacgctcggtttcgtcggtcaccgccgtcctacgggcatcacggtaaggagacacggatacgggcccatcctcgtctgcgaccacgacgaaacggtcgtctagttccatccgctctccggctatgtccaccataacctccccactctccgcgggtcgaatgatcagatctcccgtgagcttatcggcgtcgaagcagctgatcggcacacggtactcggcggaggcgagattgtaggagtcaaccaccgcgttgatcctcgggaagttacccctcagagcgcgtcgcagcagggcctctccggccggtctcaccttggtggggtctacgtcgatcgaccacaagtagtcccggtacgcgcggactatcggatcgtctttcaagtcgtccaaatcgaaccgttcgcgtaacctcgccgtaactcgatcaacgagctccgaggcgtcggctccgggatcgacaccctcaactctaacgtacgcgtagcgtagtcccctatcgttaacctccgggtccacttcgacccgcatctcccgcaccccgtttctccatcgttatcaggacgcgcttaccggccgattgaaatctgacgagcttccagtccatatccctcatgatgccgaccacggtgcccggagatacccaggcgttgttaccggtgaaaacgtggatgagtctcgtagccacgcgggccgctcggctcgtagggtcgggcagtaccacggccatcctacatccgcgagctgctaccctgtctacctctttcagggccctgatcacgtcgaggtgctggagtatctcggaaaggacgataccgtcgaagcacgcgtccgggaaaggtaaattatgagcgtcagcccggacgaacttaacgttgggtagccggtttcgggactgcgaagcttccaccatcttcctgttgatgtccacacccacgactcggtcacatacggcggcgagcttgcgcgtcaggtaaccggtcgcgcaaccgacgtcaaggactcgacaacatcctttaagatctcgcagaatctctttgacgaggtgtttcggcagcgaaaggggggaacgctcgtatactcgggaaagtagcccgtagaataccctctgccgtgtcccttccacagcagtacgtatctctcacacccccctcgtgcggcgcggggtgaacggttgtgatcaaaagaatactcccgtgcactgtgctggccatgatagtctgtaccgcggtaggactccaacccgctcattcggaaaaggctcccgtaccgaaaccaccgaagctggaggagaagaaagaggaagaaaagaaagaagaaaaggagagaaaagagtcgaccttgaaaccgggcaagtacaaggtcgcggaagcggacttcaagaacggggtcgtgtacttaaaacccctgtacaagcctaagccggtcatcccagtgaaggtccctccacgggtcatccgaaagctacgtcccggcaccgtcgtcgaagttcaccagcgcggtagcagtaccgtgatcagaaccgcgagtgggaccgcggaaggttcaacggtaataacccgtaccgagtcctcctcgggcacgatgggtcacacgacctcttcgagcgaggctcttcaaactgggtcaacatcgtcgtcgacatcgacaccgtcacacacttcggtgggtacctcggcgggtgcgggaacgtacgggaacaccaccgtgaatgcgaaggagaagaccgtatcgtcagagggcggaaaaacggcgggatcgtccaaatcgaaggaaagtaagggtaagcgggaaaagaaggagaagaaccgaagcagcaaggagaaaataaaggtgaaaaggccgaagagttccggatcgtccgatctagaactacagcgtgaagcgagtagcggaagctcgtcaggatgggcgccctatctagtggctatcgccctggtaggagcggccaccggtggcatgtggctcgtcaagcagcggaggtcgacgacgtgggagtgggagtaaaggaacccaccggaccgcgaacattttgatctccgagtactgatttttcgcacggggaccacgcatgtttgaagggactgggtttgggtgggtagaatacggcggcgagaggtacaatcacgatatttacgtgacaaccgaagggaaggttcaccggcgtgagaagggactctccaggagtaagttcggcaccagccataacctggcggccgacgagttgagacgactcctggagttgtgcgacgaggagccggaggtcatcgtggtggggacgggccagagcggtgttctgtccgttacggaagaagcccgggagttctgcgaggagcgagggatagagctcgtagaggccccaactccggaggcgatagagcggtacaacgagctcaaagataagggcaaaaaagtggcggccgtgattcatacgacgtgctaggagggcccgaactccacctcgatgtattctttcgtacgttcgtcctgaggatcggtgaacagcttctcggtgctgttcgcctcgactagctcgccatgtaggaagaacgcggtgtagtctccaatccgatacgcctgagggagcaagtgtgtgacgaatactatggtcacttctcctttgagctccatgactgtctcctcgattttcctcgtcgcaatcgggtcgaggtcggaggtgggctcgtccatcagcaatacctcggggcgcatcgccaaagctctcgcgatacagagcctctgctgttgaccaccggatagcgctgaagccgggtcgtcgagtctgtcctccacctggtcgagtagtgcggccttctctagtgcctcgtacacgcggtcttcgatctcatcctcgtccatacccatcagccggagtccgtaggcgacgttgtcgtagatggacatccaggggaatgggttggggtgctggaacaccgttccaacacggcgccggtgagcgatgatatcggcttcatcctcgtactccaggacgttctcgccgtcgaagatcacctctccctccgtgcgcgcgtacggaatttctttgatcattaaattgaggcaacgaaggaacgtggacttaccgcaaccggatggtcctatgatggtggtgatcttcttttctggaatatccagagtgatgccctttagtgcctcctcctcgccgtagtacacgcgtagatcacgtacctcgaacgccgtcattggctcaaccccgccgaccgatcttcctttcgaacttatcccgcatgtaaatcgccaagaggttcagcccgagcgtcaccgcgaccagaacggtcgccgcggcaaacgccgtggcgcgtgctcccggctccattaagtactccttggcaatcagataaatgcggaacgccagcgcgtcggtaggctggagcacgtgaacgaacgggttggtgctgatcaaccctatcatgaccgcggtcaggatgatcggcgcggcctcctccgccgctcgacacatcgacagcgtgattccggccgtaattcccggtttcgccatcggtagcagtacgtccctgacaacgtggaaccaagaggcgcccataccccgtgccgcctcgacgtactcccgcggtacggacctgaaggcctcctccgccgtcctcaccatcactgggagattcatgactgccaacgtcaacgctcctgcgaggaccgagtatcccatcttcatgtaaaccacgaagagcgtcgcaccgaacagtccgtagacgatagagggaactccggcgagagtgtcgatcgcgaaccgaactgcgcgggtgaaggcggtgtcgcctgcgaactccgcgaggtagagcgccgtcggaattccgatcagcgccgcgaaaactgtcgagtagaacatcagcgctagggttcccaacaaggcggggtataacgagctgtggacggggtccccgatgttgataggaccgaacaggatgttccagctgagcgcccctacaccgttggcgaagatgtaacccgttatccccactagagcagccgccgctatcacaccggccagcaccatcaatccggtcatcagtttactcacgattaccggattcagccgagcgtggtgtgacttgcgcttcctgacacggatacgacccgtacgcctccggtaacggtacgccagaacgatcacaccggttaccatcagcatcagcacgaggcctccgaagtacagagcgtaatacccaggtgagcccaccggcagtacggtagcctgaagcaggatatgagccgaaagcggtcgacacggatccagcggtgaggtaggtatcatcaaggcggcaccggcgaccaacgccacggcaacggtctcacccatcgccctcagagtacccagcatgcctccggccgtgataccagacctagccgcgggccacagtacggtcctcaccacctgccatcgagtcgctcccattcccaacgcggcctccacgtactctcgcggaaccgccctcatcgcttccatcatcacgctggtcatgtaaggaaggatcatgatggcgactataatgcccgccacgagtaccgagtaacccgtaggagccccgagatactccctggcgaacgggacgagagtcagaataccgaacagaccgtacacgactgaaggtataccggccagcatgtcgatcgcaggtcgcaaggtccgtctgaggatccttggagcgaactcggccagataagtcgcgcaaagcagcgaaatcgggaaggctatcaccacggctatgagcgtcacgtatagcgtcgagattatcatagggagcaatcctaaccgtggagggtagctgtcgggcctccagacggtaccgaacagtatgtcgatcacggaatcatattgcagagctttaacgccgttcagcgtgaggaacaagtaaatcccgatcaccgcggcgatcgagatggcggccgccgcggtggccgacttaattagattctcagactcctgggcttgcttcgcggcaacttcccgcatcactggtcccccggtgggatttgataaagatctttaggaggatcgaagaggagccgcccaactccgttacttaactagcggtttgatctctatgtacggcttcttagagaacagcggtgcatcctcgggtaccgggacgtatcccaccttctccgcgaactccttgttgacgtccggcttcctgatccacttgatcaaagcgatcgccgtcttcggggcattggagcggtcgatgatcaggtactcggccctgaccagtgggtacttcttcgcgatgatcgtctgctcgttggcttcaacaccgttgactttcagcggcttcaccgcgctcggcaccttaccgcccttcttggctttgacgacgtaggcgtaatccacgtaaccgatagcgtacggcgtcttctctaccttctccaggacctccgagttagacccacagaggatggcgtccttggtgtaatcctggatgtttaggtacttgtcaaacgttgaccgcgtgcctgaacccttcgcacgaccgattacgacgattttcttgtgtggtagacccggcttcacctgatcccagtacttgatcttaccggtatagatgtccctaagcgtcttcgggtcgatgtcgtctaactggcctagcgtcttcccattcacgatcggtacaatcgctgataggaccacaggacacatcacaggatcacttaactgctgagcttcttcaggcttcagtggtctcgatgccatagcgatatcgaacgttccctcaatgagacccttaatacctgcggaggatccaccatcagaaaccatcaactgtacgggctcgtcaggtagtccttgaacacccacttgttcgccaatctgcttccatgtcattcggtgttcttcaccgacataagctgcaaccttcatcataaatggcattagactcgtcgatcctcctatccttagctgtgtttttactgcacccgctgtggagtagtagtaagccgcgcctcctgcgatgaccgcgatcgcgaccacagccgcaattaggtacttcttcaaaatttcaccccccactgaaccacaagagattgcattataaagttgacggaacttgatcggaagttcctaaaatgtgaaggggggtctgctctgcggcagtgccggatttgcggaatacctgagaccgttgacggagtagaactggacgaaagcggcgtgtgcagggcctgccgacgacagatccggcacatacccagcaggaaggagctccgcgaaaaagtccggaaggccctcgagaactcggagaaggtcctggtggcggtttcaggaggtctggatagcctcgctgcgttgggactcgccttgagaatctgcgatgaagtagtagcgctgactgtggacaccggtgcgctccacccggaggcctggcggaggataatcctggctcggaggatgtctggtatagagtgggaaatcatcggcgaccaaaagccgttcttgaagttgttcgaagagagattgacccgagccgagtcaccgtgtggaccatgctcacgtatgatcacgcgaagatacgaacggagggctcgggaactcggtgtggacgccatagtaactggacatgagctacctcacgggacgtcacctgtggtccccaaggacccaccggtgattagagcgatgtgtggaatgacggaaaacgagcgccgggaaatcgtcgaagaagagttcggactgactgttgacaagatatcgggttacacctctaactgcatcgtactaccgtttgccttgaagctattctacatgaaatatggatacagctttgaagcaccacggttagcagcaatggtacgatatggatacatttctagagaagatatggaacaaattatgacgcctccgacgttatctgacctcaaagaactgttaagggagtgcgaggaatggattccagaaagcttaaaacagatgttacagaaggttatcaacaagatatcaaattcggatcttggacgcgaaaatggggactaaaatcactttcagaacttctggagcttttaaggaaaaaagttagtggcaaaaaaatttgtgttctgatttcaggcgggatggatagtgctgttgcaacgaagattttacagttgtctaataccgatgtgagaggacttcatataacacatagatggatgtggttcacgccggagattgaaatcaaacgaatatctaaaatgctcgggattaagatagacgttgttgatataactgatgagttaaggcgtagacttcgaggtgctaaaggcaaatctgtgtgtaaaatatgcaagaagattatgttggagatagctgttagtaaggccagtgttgtggccacgggagaatgtggtatggacaccatagcgggtgccgttttggacgtgtcgaggcgaaccgggatcgaaccggagttcgtccagttgcccaagaggtacttcaacggagacgatcgcatcatcgtgcggccgctgatccgcatccacgagagcgacgtgaagaggctcgccaggcttctaggtgtgaaagtacgacgggtcggggagaccggggatctccgtaggggacgccgtgaagggtgtccgctccaacacctggacccgtgggtggacgttaccgatgagctgatggacgaagtctgggacgtcaacgtagaggcgttactcgtagccaggaggttagggcgtcgggtatccgtgaagtggccatcgttcaggatcatattggaaggaagtcccgaagagcgacgtcacgttgcggagtgtgtctggtacaggtgggttcgagctggaagaccccgccggtacaggtagagtcctatcgtggctatcaacgttaccgcgactatcagcgccgccaccgatccccagcctgagactacgggttccggtctctcacgctccatgaccctggccgactctgaagggtgttcgtgcgatttctttccggttttctcagaggagggactggcggtcctcgtcccacccacggtggttcttgaaacctctccttcggtgccggatgctaccccaacggacgacttccgcgcggtggtcactgatgtcgccgtcgagccgcgaccgtacccgcccgcaccggtgttcggagtacctccacccgcagcgactcgtctggatacatgggccgtggtagacctcgacgtggagtaccccgcaggatgttccttgacgactgtggtcgcaccaccacgagggtgttcggtctcggatcgcgtcacggttctcccggaagtccttccggaaggttgtctaggttccgtcg

SEQ ID NO: 1691 - DNA, 30 bp, M. kandleri
attccatgggtgtgaagctgatgcgaacgg

SEQ ID NO: 1692 - DNA, 38 bp, M. kandleri
atagaattcactcagcttcctctccttcactctcctcc

SEQ ID NO: 1693 - DNA, 35 bp, M. kandleri
attccatggtaggggtggtgaacgtgactcgaccc

SEQ ID NO: 1694 - DNA, 43 bp, M. kandleri
aatgaattctagtgcttctgcagtacttcctcgtagatcctcc

SEQ ID NO: 1695 - DNA, 34 bp, M. kandleri
tatccatggtgtactactcgtccctggcggaggc

SEQ ID NO: 1696 - DNA, 43 bp, M. kandleri; identical to SEQ ID NO: 1694

SEQ ID NO: 1697 - DNA, 33 bp, M. kandleri
aatccatggagcgtgagttcgaagaggctctca

SEQ ID NO: 1698 - DNA, 33 bp, M. kandleri
aatgaattcacatcgggagggtacactccgggc

SEQ ID NO: 1699 - DNA, 34 bp, M. kandleri
attccatggttcgatccacaggggttcctggagg

SEQ ID NO: 1700 - DNA, 34 bp, M. kandleri
atagaattcagaagaacgcgtccagggtctcttg

SEQ ID NO: 1701 - DNA, 58 bp, M. kandleri
ctatagggagaccggaattcgagctcgcccgggcgagctcgaattccgtgtatttata

SEQ ID NO: 1702 - DNA, 33 bp, M. kandleri
taaccatggacctctggaaagacctggaaccgg

SEQ ID NO: 1703 - DNA, 33 bp, M. kandleri
atagaattcacccgtgctcctcctcgtacagct

SEQ ID NO: 1704 - DNA, 33 bp, M. kandleri
atactgcagccatggccgagcacgagctacgcg

SEQ ID NO: 1705 - DNA, 37 bp, M. kandleri
ataaagcttctacccgccggagtactcgttaccgagt

SEQ ID NO: 1706 - DNA, 29 bp, M. kandleri
gcgttcagctcgaggaagttgtctctcca

SEQ ID NO: 1707 - DNA, 30 bp, M. kandleri
ctccgatgagaggggtatcgacgtaattcg

SEQ ID NO: 1708 - DNA, 34 bp, M. kandleri
aatccatggtagcaccgttggtcccttgggttga

SEQ ID NO: 1709 - DNA, 39 bp, M. kandleri
ataaagcttcagaagaacgcgtctaacgtcctctgttca

SEQ ID NO: 1710 - DNA, 39 bp, M. kandleri
tatccatggggttgctccgtacagtgtgggtagattacg

SEQ ID NO: 1711 - DNA, 34 bp, M. kandleri
ctagaattcagccgaagaactgatccagcgtctt

SEQ ID NO: 1712 - DNA, 21 bp, M. kandleri
gtaatacgactcactataggg

SEQ ID NO: 1713 - DNA, 33 bp, M. kandleri
atcattcatatggtggagttcagggcctaccag

SEQ ID NO: 1714 - DNA, 33 bp, M. kandleri
agatatgaattcaaggaggaagggttcactcct

SEQ ID NO: 1715 - DNA, 29 bp, M. kandleri
tatccatggcctcgtcgtcgaaggagacg

SEQ ID NO: 1716 - DNA, 38 bp, M. kandleri
ttagaattcagaccaccttggctgacttcaacttcttg

SEQ ID NO: 1717 - DNA, 30 bp, M. kandleri
ccatcggttccggagggtagagagaatacg

SEQ ID NO: 1718 - DNA, 37 bp, M. kandleri
attgaattcgactcagggtttgagcgacgagatcctg

SEQ ID NO: 1719 - DNA, 35 bp, M. kandleri
ttaccatggacttctattcgccaaccttccacagc

SEQ ID NO: 1720 - DNA, 32 bp, M. kandleri
taagaattcacggcttaagctcccccagcacc

SEQ ID NO: 1721 - DNA, 31 bp, M. kandleri
tatccatgggctcatggttcccccacgcccc

SEQ ID NO: 1722 - DNA, 31 bp, M. kandleri
atagaattcatccgtcgtcggccctaggtcg
